(19) United States
(12) Patent Application Publication
(10) Pub. No.: US 2009/0144847 A1
(43) Pub. Date: Jun. 4, 2009

(54) Genes and uses for plant enhancement

(76) Inventors: Faten Shaikh, Raleigh, NC (US); Marie A. Coffin, Cary, NC (US); Maria C. Bohannon, Raleigh, NC (US); Amanda Winslow, Hertford, NC (US)

Correspondence Address: MONSANTO COMPANY, 800 N. LINDBERGH BLVD., ATTENTION: GAIL P. WUELLNER, IP PARALEGAL, (E2NA), ST. LOUIS, MO, 63167, US

(21) Appl. No.: 12/290,057

(22) Filed: Oct. 27, 2008

Related U.S. Application Data
(60) Provisional application No. 61/190,041, filed on Oct. 31, 2007.

(51) Int. Cl. C12N 15/11; A01H 5/00; A01H 1/02; C12N 5/04

(52) U.S. Cl. 800/275; 800/298; 800/320.1; 800/314; 800/312; 800/320.3; 800/320.2; 800/278; 800/289; 800/281; 435/419

(57) ABSTRACT

Transgenic seed for crops with enhanced agronomic traits are provided by trait-improving recombinant DNA in the nucleus of cells of the seed where plants grown from such transgenic seed exhibit one or more enhanced traits as compared to a control plant. Of particular interest are transgenic plants that have increased yield. The present invention also provides recombinant DNA molecules for expression of a protein, and recombinant DNA molecules for suppression of a protein.

### CROSS REFERENCE TO RELATED APPLICATIONS

[0001] This application claims benefit under 35 U.S.C. § 119(e) of U.S. provisional application Ser. No. 61/190,041 filed on Oct. 30, 2007 which is incorporated herein by reference in its entirety.

### INCORPORATION OF SEQUENCE LISTING

[0002] Two copies of the sequence listing (Copy 1 and Copy 2) and a computer readable form (CRF) of the sequence listing, all on CD-Rs, each containing the file named 38-21(54975)B_seqListing.txt, which is 12,914,688 bytes (measured in MS-WINDOWS) and was created on Oct. 23, 2008, are incorporated herein by reference in their entirety.

### INCORPORATION OF COMPUTER PROGRAM LISTING

[0003] A Computer Program Listing with folders “hmmer-2.3.2” and “47pfamDir” is contained on a CD-R and is incorporated herein by reference in their entirety. Folder hmmer-2.3.2 contains the source code and other associated file for implementing the HMMer software for Pfam analysis. Folder 47pfamDir contains 47 profile Hidden Markov Models. Both folders were created on the disk on Oct. 23, 2008 having a total size of 4,816,896 bytes when measured in MS-WINDOWS® operating system.

### FIELD OF THE INVENTION

[0004] Disclosed herein are transgenic plant cells, plants and seeds comprising recombinant DNA and methods of making and using such plant cells, plants and seeds.

### SUMMARY OF THE INVENTION

[0005] This invention provides plant cell nuclei with recombinant DNA that imparts enhanced agronomic traits in transgenic plants having the nuclei in their cells, e.g. enhanced water use efficiency, enhanced cold tolerance, enhanced heat tolerance, enhanced shade tolerance, enhanced high salinity tolerance, increased yield, enhanced nitrogen use efficiency, enhanced seed protein or enhanced seed oil. In certain cases the trait is imparted by producing in the cells a protein that is encoded by recombinant DNA and/or in other cases the trait is imparted by suppressing the production of a protein that is natively produced in the cells.

[0006] Such recombinant DNA in a plant cell nucleus of this invention is provided in as a construct comprising a promoter that is functional in plant cells and that is operably linked to DNA that encodes a protein or to DNA that results in gene suppression. Such DNA in the construct is sometimes defined by protein domains of an encoded protein targeted for production or suppression, e.g. a “Pfam domain module” (as defined herein below) from the group of Pfam domain modules identified in Table 17. Alternatively, e.g. where a Pfam domain module is not available, such DNA in the construct is defined a consensus amino acid sequence of an encoded protein that is targeted for production or suppression, e.g. a protein having amino acid sequence with at least 90% identity to a consensus amino acid sequence in the group of SEQ ID NO: 4819 through SEQ ID NO: 4825.

[0007] Other aspects of the invention are directed to specific derivative physical forms of the transgenic plant cell nuclei, e.g. where such a transgenic nucleus is present in a transgenic plant cell, a transgenic plant including plant part(s) such as progeny transgenic seed, and a haploid reproductive derivative of plant cell such as transgenic pollen and transgenic ovule. Such plant cell nuclei and derivatives are advantageously selected from a population of transgenic plants regenerated from plant cells having a nucleus that is transformed with recombinant DNA by screening the transgenic plants or progeny seeds in the population for an enhanced trait as compared to control plants or seed that do not have the recombinant DNA in their nuclei, where the enhanced trait is enhanced water use efficiency, enhanced cold tolerance, enhanced heat tolerance, enhanced shade tolerance, enhanced high salinity tolerance, increased yield, enhanced nitrogen use efficiency, enhanced seed protein or enhanced seed oil.

[0008] In other aspects of the invention the nuclei of plant cells and derivative transgenic cells, plants, seeds, pollen and ovules further include recombinant DNA expressing a protein that provides tolerance from exposure to one or more herbicide applied at levels that are lethal to a wild type plant. Such herbicide tolerance is not only an advantageous trait in such plants but is also useful as a selectable marker in the transformation methods for producing the nuclei and nuclei derivatives of the invention. Such herbicide tolerance includes tolerance to a glyphosate, dicamba, or glufosinate herbicide.

[0009] Yet other aspects of the invention provide transgenic plant cell nuclei which are homozygous for the recombinant DNA. The transgenic plant cell nuclei of the invention and derivative cells, plants, seed and haploid reproductive derivatives of the invention are advantageously provided in corn, soybean, cotton, canola, alfalfa, wheat, rice plants, or combinations thereof.

[0010] This invention also provides methods for manufacturing non-natural, transgenic seed that can be used to produce a crop of transgenic plants with an enhanced trait resulting from expression of stably-integrated, recombinant DNA in the nucleus of the plant cells. More specifically the method includes, but are not limited to, (a) screening a population of plants for an enhanced trait and recombinant DNA, where individual plants in the population can exhibit the trait at a level less than, essentially the same as or greater than the level that the trait is exhibited in control plants which do not express the recombinant DNA; (b) selecting from the population one or more plants that exhibit the trait at a level greater than the level that said trait is exhibited in control plants and (c) collecting seed from a selected plant. Such method can further include the steps of (a) verifying that the recombinant DNA is stably integrated in said selected plants; and (b) analyzing tissue of a selected plant to determine the production of a protein having the function of a protein encoded by a recombinant DNA with a sequence of one of SEQ ID NO: 1-114; In one aspect of the invention the plants in the population can further include DNA expressing a protein that provides tolerance to exposure to an herbicide applied at levels that are lethal to wild type plant cells and where the selecting is effected by treating the population with the herbicide, e.g. a glyphosate, dicamba, or glufosinate compound. In another aspect of the invention, the plants are selected by identifying plants with the enhanced trait. The methods can be used for manufacturing corn, soybean, cotton, canola, alfalfa, wheat and/or rice seed selected as having one of the enhanced traits described above.

[0011] Another aspect of the invention provides a method of producing hybrid corn seed including the step of acquiring hybrid corn seed from a herbicide tolerant corn plant which also has a nucleus of this invention with stably-integrated, recombinant DNA. The method can further include the steps of producing corn plants from said hybrid corn seed, where a fraction of the plants produced from said hybrid corn seed is homozygous for said recombinant DNA, a fraction of the plants produced from said hybrid corn seed is hemizygous for said recombinant DNA, and/or a fraction of the plants produced from said hybrid corn seed has none of said recombinant DNA; selecting corn plants which are homozygous and hemizygous for said recombinant DNA by treating with an herbicide; collecting seed from herbicide-treated-surviving corn plants and planting said seed to produce further progeny corn plants; repeating the selecting and collecting steps at least once to produce an inbred corn line; and crossing the inbred corn line with a second corn line to produce hybrid seed.

### BRIEF DESCRIPTION OF THE DRAWINGS

[0012] FIGS. 1, 2 and 3 are pictures illustrating plasmid maps.

[0013] FIG. 4 illustrates a consensus amino acid sequence of SEQ ID NO: 181 and its homologs.

### DETAILED DESCRIPTION OF THE INVENTION

[0014] In the attached sequence listing:

[0015] SEQ ID NO: 1-114 are nucleotide sequences of the coding strand of DNA for “genes” used in the recombinant DNA imparting an enhanced trait in plant cells, i.e. each represents a coding sequence for a protein;

[0016] SEQ ID NO: 115-228 are amino acid sequences of the cognate protein of the “genes” with nucleotide coding sequence 1-114;

[0017] SEQ ID NO: 229-4815 are amino acid sequences of homologous proteins;

[0018] SEQ ID NO: 4816 is a nucleotide sequence of a plasmid base vector useful for corn transformation; and

[0019] SEQ ID NO: 4817 is a DNA sequence of a plasmid base vector useful for soybean transformation.

[0020] SEQ ID NO: 4818 is a DNA sequence of a plasmid base vector useful for cotton transformation.

[0021] SEQ ID NO: 4819-4825 are consensus sequences.

[0022] Table 1 lists the protein SEQ ID NOs and their corresponding consensus SEQ ID NOs.

TABLE 1

| GENE ID | PEP SEQ ID | CONSENSUS SEQ ID |
|---|---|---|
| CGPG3454 | 151 | 4819 |
| CGPG4528 | 181 | 4820 |
| CGPG4560 | 183 | 4821 |
| CGPG7500 | 206 | 4822 |
| CGPG7639 | 213 | 4823 |
| CGPG8137 | 226 | 4824 |
| CGPG8180 | 228 | 4825 |

[0023] The nuclei of this invention are identified by screening transgenic plants for one or more traits including enhanced drought stress tolerance, enhanced heat stress tolerance, enhanced cold stress tolerance, enhanced high salinity stress tolerance, enhanced low nitrogen availability stress tolerance, enhanced shade stress tolerance, enhanced plant growth and development at the stages of seed imbibition through early vegetative phase, and enhanced plant growth and development at the stages of leaf development, flower production and seed maturity.

[0024] “Gene” means a chromosomal element for expressing a protein and specifaccly includes the DNA encoding a protein. In cases where expression of a target protein is desired, the pertinent part of a gene is the DNA encoding the target protein; in cases where suppression of a target is desired, the pertinent part of a gene is that part that is transcribed as mRNA. “Recombinant DNA” means a polynucleotide having a genetically engineered modification introduced through combination of endogenous and/or exogenous elements in a transcription unit. Recombinant DNA can include DNA segments obtained from different sources, or DNA segments obtained from the same source, but which have been manipulated to join DNA segments which do not naturally exist in the joined form.

[0025] “Trait” means a physiological, morphological, biochemical, or physical characteristic of a plant or particular plant material or cell, or any combinations thereof.

[0026] A “control plant” is a plant without trait-improving recombinant DNA in its nucleus. A control plant is used to measure and compare trait enhancement in a transgenic plant with such trait-improving recombinant DNA. A suitable control plant can be a non-transgenic plant of the parental line used to generate a transgenic plant herein. Alternatively, a control plant can be a transgenic plant having an empty vector or marker gene, but does not contain the recombinant DNA that produces the trait enhancement. A control plant can also be a negative segregant progeny of hemizygous transgenic plant. In certain demonstrations of trait enhancement, the use of a limited number of control plants can cause a wide variation in the control dataset. To minimize the effect of the variation within the control dataset, a “reference” is used. As use herein a “reference” is a trimmed mean of all data from both transgenic and control plants grown under the same conditions and at the same developmental stage. The trimmed mean is calculated by eliminating a specific percentage, i.e., 20%, of the smallest and largest observation from the data set and then calculating the average of the remaining observation.

[0027] “Trait enhancement” means a detectable and desirable difference in a characteristic in a transgenic plant relative to a control plant or a reference. In some cases, the trait enhancement can be measured quantitatively. For example, the trait enhancement can entail at least a 2% desirable difference in an observed trait, at least a 5% desirable difference, at least about a 10% desirable difference, at least about a 20% desirable difference, at least about a 30% desirable difference, at least about a 50% desirable difference, at least about a 70% desirable difference, or at least about a 100% difference, or an even greater desirable difference. In other cases, the trait enhancement is only measured qualitatively. It is known that there can be a natural variation in a trait. Therefore, the trait enhancement observed entails a change of the normal distribution of the trait in the transgenic plant compared with the trait distribution observed in a control plant or a reference, which is evaluated by statistical methods provided herein. Trait enhancement includes, but is not limited to, yield increase, including increased yield under non-stress conditions and increased yield under environmental stress conditions. Stress conditions can include, for example, drought, shade, fungal disease, viral disease, bacterial disease, insect infestation, nematode infestation, cold temperature exposure, heat exposure, osmotic stress, reduced nitrogen nutrient availability, reduced phosphorus nutrient availability, high plant density, or any combinations thereof.

[0028] Many agronomic traits can affect “yield”, including without limitation, plant height, pod number, pod position on the plant, number of internodes, incidence of pod shatter, grain size, efficiency of nodulation and nitrogen fixation, efficiency of nutrient assimilation, resistance to biotic and abiotic stress, carbon assimilation, plant architecture, resistance to lodging, percent seed germination, seedling vigor, juvenile traits, or any combinations thereof. Other traits that can affect yield include, efficiency of germination (including germination in stressed conditions), growth rate (including growth rate in stressed conditions), ear number, seed number per ear, seed size, composition of seed (starch, oil, protein) and characteristics of seed fill. Also of interest is the generation of transgenic plants that demonstrate desirable phenotypic properties that can confer an increase in overall plant yield. Such properties include enhanced plant morphology, plant physiology or improved components of the mature seed harvested from the transgenic plant.

[0029] “Yield-limiting environment” means the condition under which a plant would have the limitation on yield including environmental stress conditions.

[0030] “Stress condition” means a condition unfavorable for a plant, which adversely affect plant metabolism, growth and/or development. A plant under the stress condition typically shows reduced germination rate, retarded growth and development, reduced photosynthesis rate, and eventually leading to reduction in yield. Specifically, “water deficit stress” used herein refers to the sub-optimal conditions for water and humidity needed for normal growth of natural plants. Relative water content (RWC) can be used as a physiological measure of plant water deficit. It measures the effect of osmotic adjustment in plant water status, when a plant is under stressed conditions. Conditions which can result in water deficit stress include, but are not limited to, heat, drought, high salinity and PEG induced osmotic stress.

[0031] “Cold stress” means the exposure of a plant to a temperatures below (two or more degrees Celsius below) those normal for a particular species or particular strain of plant.

[0032] “Nitrogen nutrient” means any one or any mix of the nitrate salts commonly used as plant nitrogen fertilizer, including, but not limited to, potassium nitrate, calcium nitrate, sodium nitrate, ammonium nitrate. The term ammonium as used herein means any one or any mix of the ammonium salts commonly used as plant nitrogen fertilizer, e.g., ammonium nitrate, ammonium chloride, ammonium sulfate, etc.

[0033] “Low nitrogen availability stress” means a plant growth condition that does not contain sufficient nitrogen nutrient to maintain a healthy plant growth and/or for a plant to reach its typical yield under a sufficient nitrogen growth condition. For example, a limiting nitrogen condition can refers to a growth condition with 50% or less of the conventional nitrogen inputs. “Sufficient nitrogen growth condition” means a growth condition where the soil or growth medium contains or receives optimal amounts of nitrogen nutrient to sustain a healthy plant growth and/or for a plant to reach its typical yield for a particular plant species or a particular strain. One skilled in the art would recognize what constitute such soil, media and fertilizer inputs for most plant species.

[0034] “Shade stress” means a growth condition that has limited light availability that triggers the shade avoidance response in plant. Plants are subject to shade stress when localized at lower part of the canopy, or in close proximity of neighboring vegetation. Shade stress can become exacerbated when the planting density exceeds the average prevailing density for a particular plant species.

[0035] “Increased yield” of a transgenic plant of the present invention is evidenced and measured in a number of ways, including test weight, seed number per plant, seed weight, seed number per unit area (i.e., seeds, or weight of seeds, per acre), bushels per acre, tons per acre, tons per acre, kilo per hectare. For example, maize yield can be measured as production of shelled corn kernels per unit of production area, e.g., in bushels per acre or metric tons per hectare, often reported on a moisture adjusted basis, e.g., at 15.5% moisture. Increased yield can result from enhanced utilization of key biochemical compounds, such as nitrogen, phosphorous and carbohydrate, or from enhanced tolerance to environmental stresses, such as cold, heat, drought, salt, and attack by pests or pathogens. Trait-improving recombinant DNA can also be used to provide transgenic plants having enhanced growth and development, and ultimately increased yield, as the result of modified expression of plant growth regulators or modification of cell cycle or photosynthesis pathways.

[0036] A “plant promoter” is a promoter capable of initiating transcription in plant cells whether or not its origin is a plant cell. Exemplary plant promoters include, but are not limited to, those that are obtained from plants, plant viruses, and bacteria which include genes expressed in plant cells such Agrobacterium or Rhizobium. Examples of promoters under developmental control include promoters that preferentially initiate transcription in certain tissues, such as leaves, roots, or seeds. Such promoters are referred to as “tissue preferred”. Promoters which initiate transcription only in certain tissues are referred to as “tissue specific”. A “cell type” specific promoter primarily drives expression in certain cell types in one or more organs, for example, vascular cells in roots or leaves. An “inducible” or “repressible” promoter is a promoter which is under environmental control. Examples of environmental conditions that can effect transcription by inducible promoters include anaerobic conditions, or certain chemicals, or the presence of light. Tissue specific, tissue preferred, cell type specific, and inducible promoters constitute the class of “non-constitutive” promoters. A “constitutive” promoter is a promoter which is active under most conditions.

[0037] As used herein, “operably linked” refers to the association of two or more nucleic acid elements in a recombinant DNA construct, e.g. as when a promoter is operably linked with DNA that is transcribed to RNA whether for expressing or suppressing a protein. Recombinant DNA constructs can be designed to express a protein which can be an endogenous protein, an exogenous homologue of an endogenous protein or an exogenous protein with no native homologue. Alternatively, recombinant DNA constructs can be designed to suppress the level of an endogenous protein, e.g. by suppression of the native gene. Such gene suppression can be effectively employed through a native RNA interference (RNAi) mechanism in which recombinant DNA comprises both sense and anti-sense oriented DNA matched to the gene targeted for suppression where the recombinant DNA is transcribed into RNA that can form a double-strand to initiate an RNAi mechanism. Gene suppression can also be effected by recombinant DNA that comprises anti-sense oriented DNA matched to the gene targeted for suppression. Gene suppression can also be effected by recombinant DNA that comprises DNA that is transcribed to a microRNA matched to the gene targeted for suppression. In the examples illustrating the invention recombinant DNA for effecting gene suppression that imparts is identified by the term “antisense”. It will be understood by a person of ordinary skill in the art that any of the ways of effecting gene suppression are contemplated and enabled by a showing of one approach to gene suppression.

[0038] A “consensus amino acid sequence” means an artificial, amino acid sequence indicating conserved amino acids in the sequence of homologous proteins as determined by statistical analyis of an optimal alignment, e.g. CLUSTALW, of amino acid sequence of homolog proteins. The consensus sequences listed in the sequence listing were created by identifying the most frequent amino acid at each position in a set of aligned protein sequences. When there was 100% identity in an alignment the amino acid is indicated by a capital letter. When the occurance of an amino acid is at least about 70% in an alignment, the amino acid is indicated by a lower case letter. When there is no amino acid occurance of at least about 70%, e.g. due to diversity or gaps, the amino acid is indicated by an “x”. When used to defined embodiments of the invention, a consensus amino acid sequence will be aligned with a query protein amino acid sequence in an optimal alignment, e.g. CLUSTALW. An embodiment of the invention will have identity to the conserved amino acids indicated in the consensus amino acid sequence.

[0039] As used herein a “homolog” means a protein in a group of proteins that perform the same biological function, e.g. proteins that belong to the same Pfam protein family and that provide a common enhanced trait in transgenic plants of this invention. Homologs are expressed by homologous genes. With reference to homologous genes, homologs include orthologs, i.e. genes expressed in different species that evolved from a common ancestral genes by speciation and encode proteins retain the same function, but do not include paralogs, i.e. genes that are related by duplication but have evolved to encode proteins with different functions. Homologous genes include naturally occurring alleles and artificially-created variants. Degeneracy of the genetic code provides the possibility to substitute at least one base of the protein encoding sequence of a gene with a different base without causing the amino acid sequence of the polypeptide produced from the gene to be changed. When optimally aligned, homolog proteins have typically at least about 60% identity, in some instances at least about 70%, for example about 80% and even at least about 90% identity over the full length of a protein identified as being associated with imparting an enhanced trait when expressed in plant cells. In one aspect of the invention homolog proteins have an amino acid sequence that has at least 90% identity to a consensus amino acid sequence of proteins and homologs disclosed herein.

[0040] Homologs are identified by comparison of amino acid sequence, e.g. manually or by use of a computer-based tool using known homology-based search algorithms such as those commonly known and referred to as BLAST, FASTA, and Smith-Waterman. A local sequence alignment program, e.g. BLAST, can be used to search a database of sequences to find similar sequences, and the summary Expectation value (E-value) used to measure the sequence base similarity. Because a protein hit with the best E-value for a particular organism may not necessarily be an ortholog, i.e. have the same function, or be the only ortholog, a reciprocal query is used to filter hit sequences with significant E-values for ortholog identification. The reciprocal query entails search of the significant hits against a database of amino acid sequences from the base organism that are similar to the sequence of the query protein. A hit can be identified as an ortholog, when the reciprocal query's best hit is the query protein itself or a protein encoded by a duplicated gene after speciation. A further aspect of the homologs encoded by DNA useful in the transgenic plants of the invention are those proteins that differ from a disclosed protein as the result of deletion or insertion of one or more amino acids in a native sequence.

[0041] As used herein, “percent identity” means the extent to which two optimally aligned DNA or protein segments are invariant throughout a window of alignment of components, for example nucleotide sequence or amino acid sequence. An “identity fraction” for aligned segments of a test sequence and a reference sequence is the number of identical components that are shared by sequences of the two aligned segments divided by the total number of sequence components in the reference segment over a window of alignment which is the smaller of the full test sequence or the full reference sequence. “Percent identity” (“% identity”) is the identity fraction times 100. Such optimal alignment is understood to be deemed as local alignment of DNA sequences. For protein alignment, a local alignment of protein sequences should allow introduction of gaps to achieve optimal alignment. Percent identity is calculated over the aligned length not including the gaps introduced by the alignment per se.

[0042] Homologous genes are genes which encode proteins with the same or similar biological function to the protein encoded by the second gene. Homologous genes can be generated by the event of speciation (see ortholog) or by the event of genetic duplication (see paralog). “Orthologs” refer to a set of homologous genes in different species that evolved from a common ancestral gene by specification. Normally, orthologs retain the same function in the course of evolution; and “paralogs” refer to a set of homologous genes in the same species that have diverged from each other as a consequence of genetic duplication. Thus, homologous genes can be from the same or a different organism. As used herein, “homolog” means a protein that performs the same biological function as a second protein including those identified by sequence identity search.

[0043] “Arabidopsis” means plants of Arabidopsis thaliana.

[0044] “Pfam” database is a large collection of multiple sequence alignments and hidden Markov models covering many common protein families, e.g. Pfam version 19.0 (December 2005) contains alignments and models for 8183 protein families and is based on the Swissprot 47.0 and SP-TrEMBL 30.0 protein sequence databases. See S. R. Eddy, “Profile Hidden Markov Models”, Bioinformatics 14:755-763, 1998. The Pfam database is currently maintained and updated by the Pfam Consortium. The alignments represent some evolutionary conserved structure that has implications for the protein's function. Profile hidden Markov models (profile HMMs) built from the protein family alignments are useful for automatically recognizing that a new protein belongs to an existing protein family even if the homology by alignment appears to be low.

[0045] A “Pfam domain module” is a representation of Pfam domains in a protein, in order from N terminus to C terminus. In a Pfam domain module individual Pfam domains are separated by double colons “::”. The order and copy number of the Pfam domains from N to C terminus are attributes of a Pfam domain module. Although the copy number of repetitive domains is important, varying copy number often enables a similar function. Thus, a Pfam domain module with multiple copies of a domain should define an equivalent Pfam domain module with variance in the number of multiple copies. A Pfam domain module is not specific for distance between adjacent domains, but contemplates natural distances and variations in distance that provide equivalent function. The Pfam database contains both narrowly- and broadly-defined domains, leading to identification of overlapping domains on some proteins. A Pfam domain module is characterized by non-overlapping domains. Where there is overlap, the domain having a function that is more closely associated with the function of the protein (based on the E value of the Pfam match) is selected.

[0046] Once one DNA is identified as encoding a protein which imparts an enhanced trait when expressed in transgenic plants, other DNA encoding proteins with the same Pfam domain module are identified by querying the amino acid sequence of protein encoded by candidate DNA against the Hidden Markov Models which characterizes the Pfam domains using HMMER software, a current version of which is provided in the appended computer listing. Candidate proteins meeting the same Pfam domain module are in the protein family and have cognate DNA that is useful in constructing recombinant DNA for the use in the plant cells of this invention. Hidden Markov Model databases for use with HMMER software in identifying DNA expressing protein with a common Pfam domain module for recombinant DNA in the plant cells of this invention are also included in the appended computer listing.

[0047] Version 19.0 of the HMMER software and Pfam databases were used to identify known domains in the proteins corresponding to amino acid sequence of SEQ ID NO: 115 through SEQ ID NO:228. All DNA encoding proteins that have scores higher than the gathering cutoff disclosed in Table 19 by Pfam analysis disclosed herein can be used in recombinant DNA of the plant cells of this invention, e.g. for selecting transgenic plants having enhanced agronomic traits. The relevant Pfam modules for use in this invention, as more specifically disclosed below, are Saccharop_dh, Isoamylase_AP2, zf-C2H2, PLATZ, F-box::Tub, zf-C3HC4::YDG_SRA::zf-C3HC4, SBP, HLH, AP2, zf-B_box::zf-B_box, zf-C3HC4, AP2, HMG_box::HMG_box::HMG_box, zf-C3HC4, zf-C2H2, GATA, HLH, AP2, NAM, zf-Dof, WRKY, AP2, HMG_box, zf-CCCH::KH_{—}1::zf-CCCH, SRF-TF, WRKY, zf-C3HC4, zf-Dof, zf-Dof, AP2, AP2, DUF248, zf-C2H2, SRF-TF::K-box, zf-Dof, zf-C2H2, Myb_DNA-binding::Myb_DNA-binding, Myb_DNA-binding::Myb_DNA-binding::Myb_DNA-binding, SRF-TF, Pex2_Pex12::zf-C3HC4, bZIP_{—}2, HLH, GRAS, Myb_DNA-binding, GRAS, F-box, GRAS, WRKY, AT_hook::DUF296, GRAS, Myb_DNA-binding::Myb_DNA-binding, Myb_DNA-binding::Myb_DNA-binding, HLH, zf-C2H2, NAM, zf-B_box::zf-B_box, Myb_DNA-binding, NAM, PHD, SRF-TF::K-box, zf-C3HC4, HLH, SRF-TF::K-box, Myb_DNA-binding, WRVKY, SRF-TF::K-box, Myb_DNA-binding, Myb_DNA-binding::Linker_histone, Myb_DNA-binding::Myb_DNA-binding, Myb_DNA-binding::Myb_DNA-binding, bZIP_{—}1, Myb_DNA-binding::Myb_DNA-binding, SRF-TF::K-box, SRF-TF::K-box, CBFD_NFYB_HMF, AUX_IAA, Myb_DNA-binding::Myb_DNA-binding, LIM::LIM, IBR, SET, bZIP_{—}1, Mov34, ZZ::Myb_DNA-binding::SWIRM, bZIP_{—}1, E2F_TDP::E2F_TDP, Myb_DNA-binding, Prefoldin, NAM, HD-ZIP_N::Homeobox::HALZ, Myb_DNA-binding::Myb_DNA-binding, AP2, GATA, zf-C3HC4, SRF-TF::K-box, bZIP_{—}1, TCP, zf-C3HC4, Ank::Ank::zf-CCCH::zf-CCCH, Myb_DNA-binding::Myb_DNA-binding, TCP, AP2, ZZ, zf-C2H2::zf-C2H2, AP2, SRF-TF::K-box, B3, zf-LSD1::zf-LSD1, and HLH.

### Recombinant DNA Constructs

[0048] The invention uses recombinant DNA for imparting one or more enhanced traits to transgenic plant when incorporated into the nucleus of the plant cells. Such recombinant DNA is a construct comprising a promoter operatively linked to DNA for expression or suppression of a target protein in plant cells. Other construct components can include additional regulatory elements, such as 5′ or 3′ untranslated regions (such as polyadenylation sites), intron regions, and transit or signal peptides. Such recombinant DNA constructs can be assembled using methods known to those of ordinary skill in the art.

[0049] Recombinant constructs prepared in accordance with the present invention also generally include a 3′ untranslated DNA region (UTR) that typically contains a polyadenylation sequence following the polynucleotide coding region. Examples of useful 3′ UTRs include those from the nopaline synthase gene of Agrobacterium tumefaciens (nos), a gene encoding the small subunit of a ribulose-1,5-bisphosphate carboxylase-oxygenase (rbcS), and the T7 transcript of Agrobacterium tumefaciens.

[0050] Constructs and vectors can also include a transit peptide for targeting of a gene target to a plant organelle, particularly to a chloroplast, leucoplast or other plastid organelle. For descriptions of the use of chloroplast transit peptides, see U.S. Pat. No. 5,188,642 and U.S. Pat. No. 5,728,925, incorporated herein by reference.

[0051] Table 2 provides a list of genes that provided recombinant DNA that was expressed in a model plant and identified from screening as imparting an enhanced trait. When the stated orientation is “sense”, the expression of the gene or a homolog in a crop plant provides the means to identify transgenic events that provide an enhanced trait in the crop plant. When the stated orientation is “antisense”, the suppression of the native homolog in a crop plant provides the means to identify transgenic events that provide an enhanced trait in the crop plant. In some cases the expression/suppression in the model plant exhibited an enhanced trait that corresponds to an enhanced agronomic trait, e.g. cold stress tolerance, water deficit stress tolerance, low nitrogen stress tolerance and the like. In other cases the expression/suppression in the model plant exhibited an enhanced trait that is a surrogate to an enhanced agronomic trait, e.g. salinity stress tolerance being a surrogate to drought tolerance or improvement in plant growth and development being a surrogate to enhanced yield. Even when expression of a transgene or suppression of a native gene imparts an enhanced trait in a model plant, not every crop plant expressing the same transgene or suppressing the same native gene will necessarily demonstrate an indicated enhanced agronomic trait. For instance, it is well known that multiple transgenic events are required to identify a transgenic plant that can exhibit an enhanced agronomic trait. A skilled artisan can identify a transgenic plant cell nuclei, cell, plant or seed by making number of transgenic events, typically a very large number, and engaging in screening processes identified in this specification and illustrated in the examples. For example, a screening process includes selecting only those transgenic events with an intact, single copy of the recombinant DNA in a single locus of the host plant genome and further screening for transgenic events that impart a desired trait that is replicatable when the recombinant DNA is introgressed into a variety of germplams without imparting significant adverse traits.

[0052] An understanding of Table 2 is facilitated by the following description of the headings:

[0053] “NUC SEQ ID NO” refers to a SEQ ID NO. for particular DNA sequence in the Sequence Listing.

[0054] “PEP SEQ ID NO” refers to a SEQ ID NO. in the Sequence Listing for the amino acid sequence of a protein cognate to a particular DNA

[0055] “construct_id” refers to an arbitrary number used to identify a particular recombinant DNA construct comprising the particular DNA.

[0056] “Gene ID” refers to an arbitrary name used to identify the particular DNA.

[0057] “orientation” refers to the orientation of the particular DNA in a recombinant DNA construct relative to the promoter.

TABLE 2

| NUC | PEP | | | |
|---|---|---|---|---|
| Seq | SEQ | | Construct | |
| ID No. | ID | Gene ID | ID | Orientation |
| 1 | 115 | CGPG110 | 10177 | ANTI-SENSE |
| 2 | 116 | CGPG1135 | 12155 | ANTI-SENSE |
| 3 | 117 | CGPG1180 | 12233 | SENSE |
| 4 | 118 | CGPG1197 | 11873 | ANTI-SENSE |
| 5 | 119 | CGPG1802 | 17308 | SENSE |
| 6 | 120 | CGPG2561 | 78706 | SENSE |
| 7 | 121 | CGPG2580 | 72666 | SENSE |
| 8 | 122 | CGPG2582 | 17520 | SENSE |
| 9 | 123 | CGPG2591 | 72672 | SENSE |
| 10 | 124 | CGPG2597 | 78977 | SENSE |
| 11 | 125 | CGPG2602 | 17468 | SENSE |
| 12 | 126 | CGPG2642 | 75090 | SENSE |
| 13 | 127 | CGPG2651 | 72018 | SENSE |
| 14 | 128 | CGPG2662 | 17524 | SENSE |
| 15 | 129 | CGPG2708 | 72078 | SENSE |
| 16 | 130 | CGPG2710 | 72977 | SENSE |
| 17 | 131 | CGPG2722 | 17445 | SENSE |
| 18 | 132 | CGPG2736 | 78979 | SENSE |
| 19 | 133 | CGPG2759 | 18453 | SENSE |
| 20 | 134 | CGPG2765 | 17913 | SENSE |
| 21 | 135 | CGPG2802 | 18210 | SENSE |
| 22 | 136 | CGPG2823 | 78710 | SENSE |
| 23 | 137 | CGPG2889 | 73606 | SENSE |
| 24 | 138 | CGPG2902 | 18446 | SENSE |
| 25 | 139 | CGPG2913 | 75011 | SENSE |
| 26 | 140 | CGPG2945 | 18507 | SENSE |
| 27 | 141 | CGPG2962 | 18388 | SENSE |
| 28 | 142 | CGPG2967 | 18540 | SENSE |
| 29 | 143 | CGPG2983 | 19653 | SENSE |
| 30 | 144 | CGPG2996 | 18411 | SENSE |
| 31 | 145 | CGPG3307 | 70737 | SENSE |
| 32 | 146 | CGPG3311 | 18315 | SENSE |
| 33 | 147 | CGPG3350 | 75080 | SENSE |
| 34 | 148 | CGPG3355 | 19191 | SENSE |
| 35 | 149 | CGPG3447 | 18431 | SENSE |
| 36 | 150 | CGPG3453 | 18433 | SENSE |
| 37 | 151 | CGPG3454 | 18434 | SENSE |
| 38 | 152 | CGPG3455 | 19536 | SENSE |
| 39 | 153 | CGPG3488 | 76577 | SENSE |
| 40 | 154 | CGPG353 | 11113 | ANTI-SENSE |
| 41 | 155 | CGPG3537 | 19614 | SENSE |
| 42 | 156 | CGPG355 | 18204 | SENSE |
| 43 | 157 | CGPG3751 | 73614 | SENSE |
| 44 | 158 | CGPG3755 | 70450 | SENSE |
| 45 | 159 | CGPG3756 | 70618 | SENSE |
| 46 | 160 | CGPG3757 | 70458 | SENSE |
| 47 | 161 | CGPG3776 | 71306 | SENSE |
| 48 | 162 | CGPG3778 | 70451 | SENSE |
| 49 | 163 | CGPG3799 | 70453 | SENSE |
| 50 | 164 | CGPG3822 | 71311 | SENSE |
| 51 | 165 | CGPG3890 | 76533 | SENSE |
| 52 | 166 | CGPG3965 | 70955 | SENSE |
| 53 | 167 | CGPG3966 | 77708 | SENSE |
| 54 | 168 | CGPG3974 | 70954 | SENSE |
| 55 | 169 | CGPG3977 | 19742 | SENSE |
| 56 | 170 | CGPG3984 | 70960 | SENSE |
| 57 | 171 | CGPG3988 | 19940 | SENSE |
| 58 | 172 | CGPG4068 | 70921 | SENSE |
| 59 | 173 | CGPG4105 | 70953 | SENSE |
| 60 | 174 | CGPG4109 | 70978 | SENSE |
| 61 | 175 | CGPG4125 | 70940 | SENSE |
| 62 | 176 | CGPG4126 | 70977 | SENSE |
| 63 | 177 | CGPG4167 | 70993 | SENSE |
| 64 | 178 | CGPG4176 | 19762 | SENSE |
| 65 | 179 | CGPG4193 | 70938 | SENSE |
| 66 | 180 | CGPG4210 | 78653 | SENSE |
| 67 | 181 | CGPG4528 | 73216 | SENSE |
| 68 | 182 | CGPG4540 | 71139 | SENSE |
| 69 | 183 | CGPG4560 | 74227 | SENSE |
| 70 | 184 | CGPG4571 | 70678 | SENSE |
| 71 | 185 | CGPG4622 | 70769 | SENSE |
| 72 | 186 | CGPG4700 | 71643 | SENSE |
| 73 | 187 | CGPG475 | 70242 | SENSE |
| 74 | 188 | CGPG478 | 12325 | ANTI-SENSE |
| 75 | 189 | CGPG497 | 70356 | SENSE |
| 76 | 190 | CGPG5283 | 72034 | SENSE |
| 77 | 191 | CGPG5284 | 72046 | SENSE |
| 78 | 192 | CGPG5294 | 72071 | SENSE |
| 79 | 193 | CGPG5308 | 72116 | SENSE |
| 80 | 194 | CGPG5322 | 72108 | SENSE |
| 81 | 195 | CGPG5427 | 77605 | SENSE |
| 82 | 196 | CGPG5595 | 73978 | SENSE |
| 83 | 197 | CGPG5806 | 73032 | SENSE |
| 84 | 198 | CGPG626 | 11157 | SENSE |
| 85 | 199 | CGPG6434 | 73493 | SENSE |
| 86 | 200 | CGPG688 | 71228 | ANTI-SENSE |
| 87 | 201 | CGPG7334 | 74889 | SENSE |
| 88 | 202 | CGPG7339 | 74854 | SENSE |
| 89 | 203 | CGPG7350 | 74891 | SENSE |
| 90 | 204 | CGPG7475 | 75314 | SENSE |
| 91 | 205 | CGPG7493 | 75340 | SENSE |
| 92 | 206 | CGPG7500 | 75329 | SENSE |
| 93 | 207 | CGPG7598 | 75453 | SENSE |
| 94 | 208 | CGPG7600 | 75477 | SENSE |
| 95 | 209 | CGPG7604 | 75430 | SENSE |
| 96 | 210 | CGPG7615 | 75467 | SENSE |
| 97 | 211 | CGPG7630 | 75457 | SENSE |
| 98 | 212 | CGPG7631 | 75469 | SENSE |
| 99 | 213 | CGPG7639 | 75470 | SENSE |
| 100 | 214 | CGPG7644 | 75435 | SENSE |
| 101 | 215 | CGPG7691 | 77822 | SENSE |
| 102 | 216 | CGPG7696 | 75505 | SENSE |
| 103 | 217 | CGPG7703 | 75589 | SENSE |
| 104 | 218 | CGPG7707 | 75542 | SENSE |
| 105 | 219 | CGPG7731 | 75545 | SENSE |
| 106 | 220 | CGPG7734 | 75581 | SENSE |
| 107 | 221 | CGPG7753 | 75524 | SENSE |
| 108 | 222 | CGPG7836 | 75658 | SENSE |
| 109 | 223 | CGPG7867 | 75738 | SENSE |
| 110 | 224 | CGPG8105 | 77356 | SENSE |
| 111 | 225 | CGPG8132 | 77362 | SENSE |
| 112 | 226 | CGPG8137 | 77363 | SENSE |
| 113 | 227 | CGPG8175 | 77371 | SENSE |
| 114 | 228 | CGPG8180 | 77941 | SENSE |

### Recombinant DNA

[0058] DNA for use in the present invention to improve traits in plants have a nucleotide sequence of SEQ ID NO:1 through SEQ ID NO:114, as well as the homologs of such DNA molecules. A subset of the DNA for gene suppression aspects of the invention includes fragments of the disclosed full polynucleotides consisting of oligonucleotides of 21 or more consecutive nucleotides. Oligonucleotides the larger molecules having a sequence selected from the group consisting of SEQ ID NO: 1 through SEQ ID NO: 114 are useful as probes and primers for detection of the polynucleotides used in the invention. Also useful in this invention are variants of the DNA. Such variants can be naturally occurring, including DNA from homologous genes from the same or a different species, or can be non-natural variants, for example DNA synthesized using chemical synthesis methods, or generated using recombinant DNA techniques. Degeneracy of the genetic code provides the possibility to substitute at least one base of the protein encoding sequence of a gene with a different base without causing the amino acid sequence of the polypeptide produced from the gene to be changed. Hence, a DNA useful in the present invention can have any base sequence that has been changed from the sequences provided herein by substitution in accordance with degeneracy of the genetic code.

[0059] Homologs of the genes providing DNA demonstrated as useful in improving traits in model plants disclosed herein will generally have significant identity with the DNA disclosed herein. DNA is substantially identical to a reference DNA if, when the sequences of the polynucleotides are optimally aligned there is at least about 60% nucleotide equivalence over a comparison window. The DNA can also be about 70% equivalence, about 80% equivalence; about 85% equivalence; about 90%; about 95%; or even about 98% or 99% equivalence over a comparison window. A comparison window is at least about 50-100 nucleotides, and/or is the entire length of the polynucleotide provided herein. Optimal alignment of sequences for aligning a comparison window can be conducted by algorithms or by computerized implementations of these algorithms (for example, the Wisconsin Genetics Software Package Release 7.0-10.0, Genetics Computer Group, 575 Science Dr., Madison, Wis.). The reference polynucleotide can be a full-length molecule or a portion of a longer molecule. In one embodiment, the window of comparison for determining polynucleotide identity of protein encoding sequences is the entire coding region.

[0060] Proteins useful for imparting enhanced traits are entire proteins or at least a sufficient portion of the entire protein to impart the relevant biological activity of the protein. Proteins used for generation of transgenic plants having enhanced traits include the proteins with an amino acid sequence provided herein as SEQ ID NO: 115 through SEQ ID NO: 228, as well as homologs of such proteins.

[0061] Homologs of the trait-improving proteins provided herein generally demonstrate significant sequence identity. Of particular interest are proteins having at least about 50% sequence identity, at least about 70% sequence identity or higher, e.g., at least about 80% sequence identity with an amino acid sequence of SEQ ID NO:115 through SEQ ID NO: 228. Useful proteins also include those with higher identity, e.g., at lease about 90% to at least about 99% identity. Identity of protein homologs is determined by aligning the amino acid sequence of a putative protein homolog with a defined amino acid sequence and by calculating the percentage of identical and conservatively substituted amino acids over the window of comparison. The window of comparison for determining identity can be the entire amino acid sequence disclosed herein, e.g., the full sequence of any of SEQ ID NO: 115 through SEQ ID NO: 228.

[0062] The relationship of homologs with amino acid sequences of SEQ ID NO: 229 to SEQ ID NO: 4815 to the proteins with amino acid sequences of SEQ ID NO: to 115 to SEQ ID NO: 228 are found in the listing of Table 16.

[0063] Other functional homolog proteins differ in one or more amino acids from those of a trait-improving protein disclosed herein as the result of one or more of the well-known conservative amino acid substitutions, e.g., valine is a conservative substitute for alanine and threonine is a conservative substitute for serine. Conservative substitutions for an amino acid within the native sequence can be selected from other members of a class to which the naturally occurring amino acid belongs. Representative amino acids within these various classes include, but are not limited to: (1) acidic (negatively charged) amino acids such as aspartic acid and glutamic acid; (2) basic (positively charged) amino acids such as arginine, histidine, and lysine; (3) neutral polar amino acids such as glycine, serine, threonine, cysteine, tyrosine, asparagine, and glutamine; and (4) neutral nonpolar (hydrophobic) amino acids such as alanine, leucine, isoleucine, valine, proline, phenylalanine, tryptophan, and methionine. Conserved substitutes for an amino acid within a native amino acid sequence can be selected from other members of the group to which the naturally occurring amino acid belongs. For example, a group of amino acids having aliphatic side chains is glycine, alanine, valine, leucine, and isoleucine; a group of amino acids having aliphatic-hydroxyl side chains is serine and threonine; a group of amino acids having amide-containing side chains is asparagine and glutamine; a group of amino acids having aromatic side chains is phenylalanine, tyrosine, and tryptophan; a group of amino acids having basic side chains is lysine, arginine, and histidine; and a group of amino acids having sulfur-containing side chains is cysteine and methionine. Naturally conservative amino acids substitution groups are: valine-leucine, valine-isoleucine, phenylalanine-tyrosine, lysine-arginine, alanine-valine, aspartic acid-glutamic acid, and asparagine-glutamine. A further aspect of the invention includes proteins that differ in one or more amino acids from those of a described protein sequence as the result of deletion or insertion of one or more amino acids in a native sequence.

[0064] Genes that are homologous to each other can be grouped into families and included in multiple sequence alignments. Then a consensus sequence for each group can be derived. This analysis enables the derivation of conserved and class- (family) specific residues or motifs that are functionally important. These conserved residues and motifs can be further validated with 3D protein structure if available. The consensus sequence can be used to define the full scope of the invention, e.g., to identify proteins with a homolog relationship. Thus, the present invention contemplates that protein homologs include proteins with an amino acid sequence that has at least 90% identity to such a consensus amino acid sequence sequences.

### Promoters

[0065] Numerous promoters that are active in plant cells have been described in the literature. These include promoters present in plant genomes as well as promoters from other sources, including nopaline synthase (NOS) promoter and octopine synthase (OCS) promoters carried on tumor-inducing plasmids of Agrobacterium tumefaciens, caulimovirus promoters such as the cauliflower mosaic virus or Figwort mosaic virus promoters. For instance, see U.S. Pat. Nos. 5,858,742 and 5,322,938 which disclose versions of the constitutive promoter derived from cauliflower mosaic virus (CaMV35S), U.S. Pat. No. 5,378,619 which discloses a Figwort Mosaic Virus (FMV) 35S promoter, U.S. Pat. No. 6,437,217 which discloses a maize RS81 promoter, U.S. Pat. No. 5,641,876 which discloses a rice actin promoter, U.S. Pat. No. 6,426,446 which discloses a maize RS324 promoter, U.S. Pat. No. 6,429,362 which discloses a maize PR-1 promoter, U.S. Pat. No. 6,232,526 which discloses a maize A3 promoter, U.S. Pat. No. 6,177,611 which discloses constitutive maize promoters, U.S. Pat. No. 6,433,252 which discloses a maize L3 oleosin promoter, U.S. Pat. No. 6,429,357 which discloses a rice actin 2 promoter and intron, U.S. Pat. No. 5,837,848 which discloses a root specific promoter, U.S. Pat. No. 6,084,089 which discloses cold inducible promoters, U.S. Pat. No. 6,294,714 which discloses light inducible promoters, U.S. Pat. No. 6,140,078 which discloses salt inducible promoters, U.S. Pat. No. 6,252,138 which discloses pathogen inducible promoters, U.S. Pat. No. 6,175,060 which discloses phosphorus deficiency inducible promoters, U.S. Patent Application Publication 2002/0192813A1 which discloses 5′, 3′ and intron elements useful in the design of effective plant expression vectors, U.S. patent application Ser. No. 09/078,972 which discloses a coixin promoter, U.S. patent application Ser. No. 09/757,089 which discloses a maize chloroplast aldolase promoter, and U.S. patent application Ser. No. 10/739,565 which discloses water-deficit inducible promoters, all of which are incorporated herein by reference. These and numerous other promoters that function in plant cells are known to those skilled in the art and available for use in recombinant polynucleotides of the present invention to provide for expression of desired genes in transgenic plant cells.

[0066] Furthermore, the promoters can include multiple “enhancer sequences” to assist in elevating gene expression. Such enhancers are known in the art. By including an enhancer sequence with such constructs, the expression of the selected protein can be enhanced. These enhancers often are found 5′ to the start of transcription in a promoter that functions in eukaryotic cells, but can often be inserted in the forward or reverse orientation 5′ or 3′ to the coding sequence. In some instances, these 5′ enhancing elements are introns. Deemed to be particularly useful as enhancers are the 5′ introns of the rice actin 1 and rice actin 2 genes. Examples of other enhancers that can be used in accordance with the invention include elements from the CaMV 35S promoter, octopine synthase genes, the maize alcohol dehydrogenase gene, the maize shrunken 1 gene and promoters from non-plant eukaryotes.

[0067] In some aspects of the invention, the promoter element in the DNA construct can be capable of causing sufficient expression to result in the production of an effective amount of a polypeptide in water deficit conditions. Such promoters can be identified and isolated from the regulatory region of plant genes that are over expressed in water deficit conditions. Specific water-deficit-inducible promoters for use in this invention are derived from the 5′ regulatory region of genes identified as a heat shock protein 17.5 gene (HSP17.5), an HV A22 gene (HVA22), a Rab17 gene and a cinnamic acid 4-hydroxylase (CA4H) gene (CA4H) of Zea maize. Such water-deficit-inducible promoters are disclosed in U.S. application Ser. No. 10/739,565, incorporated herein by reference.

[0068] In some aspects of the invention, sufficient expression in plant seed tissues is desired to effect improvements in seed composition. Exemplary promoters for use for seed composition modification include promoters from seed genes such as napin (U.S. Pat. No. 5,420,034), maize L3 oleosin (U.S. Pat. No. 6,433,252), zein Z27 (Russell et al., (1997) Transgenic Res. 6(2):157-166), globulin 1 (Belanger et al., (1991) Genetics 129:863-872), glutelin 1 (Russell (1997) supra), and peroxiredoxin antioxidant (Per1) (Stacy et al., (1996) Plant Mol. Biol. 31(6):1205-1216).

[0069] In some aspects of the invention, expression in plant green tissues is desired. Promoters of interest for such uses include those from genes such as SSU (Fischhoff, et al., (1992) Plant Mol. Biol. 20:81-93), aldolase and pyruvate orthophosphate dikinase (PPDK) (Taniguchi, et al., (2000) Plant Cell Physiol. 41(1):42-48).

[0070] Gene suppression includes any of the well-known methods for suppressing transcription of a gene or the accumulation of the mRNA corresponding to that gene thereby preventing translation of the transcript into protein. Posttranscriptional gene suppression is mediated by transcription of RNA that forms double-stranded RNA (dsRNA) having homology to a gene targeted for suppression. Suppression can also be achieved by insertion mutations created by transposable elements can also prevent gene function. For example, in many dicot plants, transformation with the T-DNA of Agrobacterium can be readily achieved and large numbers of transformants can be rapidly obtained. Also, some species have lines with active transposable elements that can efficiently be used for the generation of large numbers of insertion mutations, while some other species lack such options. Mutant plants produced by Agrobacterium or transposon mutagenesis and having altered expression of a polypeptide of interest can be identified using the polynucleotides of the present invention. For example, a large population of mutated plants can be screened with polynucleotides encoding the polypeptide of interest to detect mutated plants having an insertion in the gene encoding the polypeptide of interest.

### Gene Stacking

[0071] The present invention also contemplates that the trait-improving recombinant DNA provided herein can be used in combination with other recombinant DNA to create plants with multiple desired traits or a further enhanced trait. The combinations generated can include multiple copies of any one or more of the recombinant DNA constructs. These stacked combinations can be created by any method, including but not limited to cross breeding of transgenic plants, or multiple genetic transformation.

### Transformation Methods

[0072] Numerous methods for producing plant cell nuclei with recombinant DNA are known in the art and can be used in the present invention. Two commonly used methods for plant transformation are Agrobacterium-mediated transformation and microprojectile bombardment. Microprojectile bombardment methods are illustrated in U.S. Pat. Nos. 5,015,580 (soybean); 5,550,318 (corn); 5,538,880 (corn); 5,914,451 (soybean); 6,160,208 (corn); 6,399,861 (corn) and 6,153,812 (wheat) and Agrobacterium-mediated transformation is described in U.S. Pat. Nos. 5,159,135 (cotton); 5,824,877 (soybean); 5,463,174 (canola), 5,591,616 (corn); and 6,384,301 (soybean), all of which are incorporated herein by reference. For Agrobacterium tumefaciens based plant transformation system, additional elements present on transformation constructs will include T-DNA left and right border sequences to facilitate incorporation of the recombinant polynucleotide into the plant genome.

[0073] Numerous methods for transforming chromosomes in a plant cell nucleus with recombinant DNA are known in the art and are used in methods of preparing a transgenic plant cell nucleus cell, and plant. Two effective methods for such transformation are Agrobacterium-mediated transformation and microprojectile bombardment. Microprojectile bombardment methods are illustrated in U.S. Pat. Nos. 5,015,580 (soybean); 5,550,318 (corn); 5,538,880 (corn); 5,914,451 (soybean); 6,160,208 (corn); 6,399,861 (corn); 6,153,812 (wheat) and 6,365,807 (rice) and Agrobacterium-mediated transformation is described in U.S. Pat. Nos. 5,159,135 (cotton); 5,824,877 (soybean); 5,463,174 (canola, also known as rapeseed); 5,591,616 (corn); 6,384,301 (soybean), 7,026,528 (wheat) and 6,329,571 (rice), all of which are incorporated herein by reference for enabling the production of transgenic plants. Transformation of plant material is practiced in tissue culture on a nutrient media, i.e. a mixture of nutrients that will allow cells to grow in vitro. Recipient cell targets include, but are not limited to, meristem cells, hypocotyls, calli, immature embryos and gametic cells such as microspores, pollen, sperm and egg cells. Callus may be initiated from tissue sources including, but not limited to, immature embryos, hypocotyls, seedling apical meristems, microspores and the like. Cells containing a transgenic nucleus are grown into transgenic plants.

[0074] In general it is useful to introduce heterologous DNA randomly, i.e., at a non-specific location, in the genome of a target plant line. In special cases it can be useful to target heterologous DNA insertion in order to achieve site-specific integration, e.g., to replace an existing gene in the genome, to use an existing promoter in the plant genome, or to insert a recombinant polynucleotide at a predetermined site known to be active for gene expression. Several site specific recombination systems exist which are known to function in plants including cre-lox as disclosed in U.S. Pat. No. 4,959,317 and FLP-FRT as disclosed in U.S. Pat. No. 5,527,695, both incorporated herein by reference.

[0075] Transformation methods of this invention can be practiced in tissue culture on media and in a controlled environment. “Media” refers to the numerous nutrient mixtures that are used to grow cells in vitro, that is, outside of the intact living organism. Recipient cell targets include, but are not limited to, meristem cells, calli, hypocotyles, immature embryos and gametic cells such as microspores, pollen, sperm and egg cells. It is contemplated that any cell from which a fertile plant can be regenerated is useful as a recipient cell. Callus can be initiated from tissue sources including, but not limited to, immature embryos, seedling apical meristems, microspores and the like. Cells capable of proliferating as callus are also recipient cells for genetic transformation. Practical transformation methods and materials for making transgenic plants of this invention, e.g., various media and recipient target cells, transformation of immature embryos and subsequent regeneration of fertile transgenic plants are disclosed in U.S. Pat. Nos. 6,194,636 and 6,232,526 and U.S. patent application Ser. No. 09/757,089, which are incorporated herein by reference.

[0076] The seeds of transgenic plants can be harvested from fertile transgenic plants and be used to grow progeny generations of transformed plants of this invention including hybrid plants line for selection of plants having an enhanced trait. In addition to direct transformation of a plant with a recombinant DNA, transgenic plants can be prepared by crossing a first plant having a recombinant DNA with a second plant lacking the DNA. For example, recombinant DNA can be introduced into a first plant line that is amenable to transformation to produce a transgenic plant which can be crossed with a second plant line to introgress the recombinant DNA into the second plant line. A transgenic plant with recombinant DNA providing an enhanced trait, e.g. enhanced yield, can be crossed with transgenic plant line having other recombinant DNA that confers another trait, for example herbicide resistance or pest resistance, to produce progeny plants having recombinant DNA that confers both traits. Typically, in such breeding for combining traits the transgenic plant donating the additional trait is a male line and the transgenic plant carrying the base traits is the female line. The progeny of this cross will segregate such that some of the plants will carry the DNA for both parental traits and some will carry DNA for one parental trait; such plants can be identified by markers associated with parental recombinant DNA, e.g. marker identification by analysis for recombinant DNA or, in the case where a selectable marker is linked to the recombinant, by application of the selecting agent such as a herbicide for use with a herbicide tolerance marker, or by selection for the enhanced trait. Progeny plants carrying DNA for both parental traits can be crossed back into the female parent line multiple times, for example usually 6 to 8 generations, to produce a progeny plant with substantially the same genotype as one original transgenic parental line but for the recombinant DNA of the other transgenic parental line

[0077] In practice, DNA is introduced into only a small percentage of target cell nuclei. Marker genes are used to provide an efficient system for identification of those cells with nuclei that are stably transformed by receiving and integrating a recombinant DNA molecule into their genomes. Some marker genes provide selective markers that confer resistance to a selective agent, such as an antibiotic or herbicide. Potentially transformed cells with a nucleus of the invention are exposed to the selective agent. In the population of surviving cells will be those cells where, generally, the resistance-conferring gene has been integrated and expressed at sufficient levels to permit cell survival. Cells can be tested further to confirm stable integration of the exogenous DNA in the nucleus. Useful selective marker genes include those conferring resistance to antibiotics such as kanamycin (nptII), hygromycin B (aph IV), spectinomycin (aadA) and gentamycin (aac3 and aacC4) or resistance to herbicides such as glufosinate (bar or pat), dicamba (DMO) and glyphosate (EPSPS). Examples of such selectable markers are illustrated in U.S. Pat. Nos. 5,550,318; 5,633,435; 5,780,708 and 6,118,047, all of which are incorporated herein by reference. Screenable markers which provide an ability to visually identify transformants can also be employed, e.g., a gene expressing a colored or fluorescent protein such as a luciferase or green fluorescent protein (GFP) or a gene expressing a beta-glucuronidase or uidA gene (GUS) for which various chromogenic substrates are known. It is also contemplated that combinations of screenable and selectable markers will be useful for identification of transformed cells. See PCT publication WO 99/61129 (herein incorporated by reference) which discloses use of a gene fusion between a selectable marker gene and a screenable marker gene, e.g., an NPTII gene and a GFP gene.

[0078] Plant cells that survive exposure to the selective agent, or cells that have been scored positive in a screening assay, can be cultured in regeneration media and allowed to mature into plants. Developing plantlets can be transferred to soil less plant growth mix, and hardened off, e.g., in an environmentally controlled chamber at about 85% relative humidity, 600 ppm CO₂, and 25-250 microeinsteins m⁻² S⁻¹ of light, prior to transfer to a greenhouse or growth chamber for maturation. Plants are matured either in a growth chamber or greenhouse. Plants are regenerated from about 6 weeks to 10 months after a transformant is identified, depending on the initial tissue. During regeneration, cells are grown to plants on solid media at about 19 to 28° C. After regenerating plants have reached the stage of shoot and root development, they can be transferred to a greenhouse for further growth and testing. Plants can be pollinated using conventional plant breeding methods known to those of skill in the art and seed produced.

[0079] Progeny can be recovered from transformed plants and tested for expression of the exogenous recombinant polynucleotide. Useful assays include, for example, “molecular biological” assays, such as Southern and Northern blotting and PCR; “biochemical” assays, such as detecting the presence of RNA, e.g., double stranded RNA, or a protein product, e.g., by immunological means (ELISAs and Western blots) or by enzymatic function; plant part assays, such as leaf or root assays; and also, by analyzing the phenotype of the whole regenerated plant.

### Discovery of Trait-Improving Recombinant DNA

[0080] To identify nuclei with recombinant DNA that confer enhanced traits to plants, Arabidopsis thaliana was transformed with a candidate recombinant DNA construct and screened for an enhanced trait.

[0081] Arabidopsis thaliana is used a model for genetics and metabolism in plants. A two-step screening process was employed which included two passes of trait characterization to ensure that the trait modification was dependent on expression of the recombinant DNA, but not due to the chromosomal location of the integration of the transgene. Twelve independent transgenic lines for each recombinant DNA construct were established and assayed for the transgene expression levels. Five transgenic lines with high transgene expression levels were used in the first pass screen to evaluate the transgene's function in T2 transgenic plants. Subsequently, three transgenic events, which had been shown to have one or more enhanced traits, were further evaluated in the second pass screen to confirm the transgene's ability to impart an enhanced trait. The following Table 3 summarizes the enhanced traits that have been confirmed as provided by a recombinant DNA construct.

[0082] In particular, Table 3 reports:

[0083] “PEP SEQ ID” which is the amino acid sequence of the protein cognate to the DNA in the recombinant DNA construct corresponding to a protein sequence of a SEQ ID NO. in the Sequence Listing.

[0084] “construct_id” is an arbitrary name for the recombinant DNA describe more particularly in Table 1.

[0085] “annotation” refers to a description of the top hit protein obtained from an amino acid sequence query of each PEP SEQ ID NO to GenBank database of the National Center for Biotechnology Information (ncbi). More particularly, “gi” is the GenBank ID number for the top BLAST hit.

[0086] “description” refers to the description of the top BLAST hit.

[0087] “e-value” provides the expectation value for the BLAST hit.

[0088] “% id” refers to the percentage of identically matched amino acid residues along the length of the portion of the sequences which is aligned by BLAST between the sequence of interest provided herein and the hit sequence in GenBank.

[0089] “traits” identify by two letter codes the confirmed enhancement in a transgenic plant provided by the recombinant DNA. The codes for enhanced traits are:

[0090] “CK” which indicates cold tolerance enhancement identified under a cold shock tolerance screen;

[0091] “CS” which indicates cold tolerance enhancement identified by a cold germination tolerance screen;

[0092] “DS” which indicates drought tolerance enhancement identified by a soil drought stress tolerance screen;

[0093] “PEG” which indicates osmotic stress tolerance enhancement identified by a PEG induced osmotic stress tolerance screen;

[0094] “HS” which indicates heat stress tolerance enhancement identified by a heat stress tolerance screen;

[0095] “SS” which indicates high salinity stress tolerance enhancement identified by a salt stress tolerance screen;

[0096] “LN” which indicates nitrogen use efficiency enhancement identified by a limited nitrogen tolerance screen;

[0097] “LL” which indicates attenuated shade avoidance response identified by a shade tolerance screen under a low light condition;

[0098] “PP” which indicates enhanced growth and development at early stages identified by an early plant growth and development screen;

[0099] “SP” which indicates enhanced growth and development at late stages identified by a late plant growth and development screen provided herein.

TABLE 3

| PEP | | | | | | | | | |
|---|---|---|---|---|---|---|---|---|---|
| SEQ | | Annotation | | | | | | | |
| ID | | % | | | | | | | |
| NO | Construct | Id | E-value | Description | traits | | | | |
| 115 | 10177 | 86 | 1.00E−100 | ref\|NP_188965.1\|ATERF1/ERF1; DNA | LN | | | | |
| | | | | binding/transcription factor/transcriptional | | | | | |
| | | | | activator [Arabidopsis thaliana] | | | | | |
| 116 | 12155 | 85 | 1.00E−178 | ref\|NP_565684.1\|nucleic acid binding/ | CS | SS | | | |
| | | | | transcription factor/zinc ion binding | | | | | |
| | | | | [Arabidopsis thaliana] | | | | | |
| 117 | 12233 | 100 | 1.00E−144 | gb\|AAG51950.1\|AC015450_11 unknown | LN | SS | | | |
| | | | | protein; 77280-78196 [Arabidopsis thaliana] | | | | | |
| 118 | 11873 | 91 | 0 | ref\|NP_187289.1\|phosphoric diester | LN | PEG | | | |
| | | | | hydrolase/transcription factor [Arabidopsis | | | | | |
| | | | | thaliana] | | | | | |
| 119 | 17308 | 94 | 0 | ref\|NP_198771.1\|protein binding/ | CK | | | | |
| | | | | ubiquitin-protein ligase/zinc ion binding | | | | | |
| | | | | [Arabidopsis thaliana] | | | | | |
| 120 | 78706 | 80 | 2.00E−75 | ref\|NP_188145.1\|SPL5 (SQUAMOSA | PEG | | | | |
| | | | | PROMOTER BINDING PROTEIN-LIKE | | | | | |
| | | | | 5); DNA binding/transcription factor | | | | | |
| | | | | [Arabidopsis thaliana] | | | | | |
| 121 | 72666 | 100 | 1.00E−135 | ref\|NP_181657.1\|DNA binding/ | SP | | | | |
| | | | | transcription factor [Arabidopsis thaliana] | | | | | |
| | | | | gb\|AAC78547.1\| | | | | | |
| 122 | 17520 | 74 | 4.00E−75 | gb\|ABK28523.1\|unknown [Arabidopsis | CK | HS | PP | PEG | |
| | | | | thaliana] | | | | | |
| 123 | 72672 | 100 | 8.00E−91 | ref\|NP_192762.1\|transcription factor/zinc | CS | | | | |
| | | | | ion binding [Arabidopsis thaliana] | | | | | |
| 124 | 78977 | 80 | 2.00E−83 | ref\|NP_173506.1\|protein binding/ | LN | | | | |
| | | | | ubiquitin-protein ligase/zinc ion binding | | | | | |
| | | | | [Arabidopsis thaliana] | | | | | |
| 125 | 17468 | 75 | 1.00E−109 | ref\|NP_195167.1\|DNA binding/ | CS | | | | |
| | | | | transcription factor [Arabidopsis thaliana] | | | | | |
| 126 | 75090 | 70 | 1.00E−166 | ref\|NP_194111.1\|transcription factor | HS | PP | SS | PEG | |
| | | | | [Arabidopsis thaliana] | | | | | |
| 127 | 72018 | 85 | 5.00E−85 | ref\|NP_179337.1\|RHA3A; protein binding/ | DS | LL | LN | | |
| | | | | ubiquitin-protein ligase/zinc ion binding | | | | | |
| | | | | [Arabidopsis thaliana] | | | | | |
| 128 | 17524 | 97 | 0 | ref\|NP_200014.1\|nucleic acid binding/ | CK | LL | PEG | | |
| | | | | transcription factor/zinc ion binding | | | | | |
| | | | | [Arabidopsis thaliana] | | | | | |
| 129 | 72078 | 74 | 1.00E−126 | ref\|NP_190677.1\|transcription factor | LL | | | | |
| | | | | [Arabidopsis thaliana] | | | | | |
| 130 | 72977 | 94 | 0 | ref\|NP_850745.1\|DNA binding/ | CK | LN | | | |
| | | | | transcription factor [Arabidopsis thaliana] | | | | | |
| 131 | 17445 | 72 | 1.00E−100 | ref\|NP_191608.1\|DNA binding/ | LN | | | | |
| | | | | transcription factor [Arabidopsis thaliana] | | | | | |
| 132 | 78979 | 82 | 1.00E−153 | ref\|NP_191212.1\|ANAC064; transcription | LL | LN | | | |
| | | | | factor [Arabidopsis thaliana] | | | | | |
| 133 | 18453 | 69 | 1.00E−154 | ref\|NP_174001.1\|DNA binding/ | CS | HS | PP | SS | |
| | | | | transcription factor [Arabidopsis thaliana] | | | | | |
| 134 | 17913 | 88 | 8.00E−69 | ref\|NP_196812.1\|WRKY75; transcription | CK | HS | | | |
| | | | | factor [Arabidopsis thaliana] | | | | | |
| 135 | 18210 | 78 | 2.00E−82 | ref\|NP_563624.1\|DNA binding/ | PEG | | | | |
| | | | | transcription factor [Arabidopsis thaliana] | | | | | |
| 136 | 78710 | 93 | 1.00E−154 | gb\|AAF79495.1\|AC002328_3F20N2.8 | HS | LN | | | |
| | | | | [Arabidopsis thaliana] | | | | | |
| 137 | 73606 | 83 | 1.00E−108 | ref\|NP_196295.1\|nucleic acid binding/ | CS | HS | SS | | |
| | | | | transcription factor [Arabidopsis thaliana] | | | | | |
| 138 | 18446 | 100 | 1.00E−166 | ref\|NP_176212.1\|transcription factor | SS | | | | |
| | | | | [Arabidopsis thaliana] | | | | | |
| 139 | 75011 | 78 | 1.00E−134 | ref\|NP_195651.1\|WRKY13; transcription | PEG | | | | |
| | | | | factor [Arabidopsis thaliana] | | | | | |
| 140 | 18507 | 68 | 1.00E−119 | ref\|NP_191581.1\|ATL4; protein binding/ | CK | SS | | | |
| | | | | ubiquitin-protein ligase/zinc ion binding | | | | | |
| | | | | [Arabidopsis thaliana] | | | | | |
| 141 | 18388 | 93 | 1.00E−133 | ref\|NP_190147.1\|DNA binding/ | SS | | | | |
| | | | | transcription factor [Arabidopsis thaliana] | | | | | |
| 142 | 18540 | 82 | 1.00E−110 | ref\|NP_193836.1\|DNA binding/ | PP | PEG | | | |
| | | | | transcription factor [Arabidopsis thaliana] | | | | | |
| 143 | 19653 | 83 | 3.00E−72 | gb\|ABB02372.1\|AP2/EREBP transcription | CS | LN | | | |
| | | | | factor [Arabidopsis thaliana] | | | | | |
| 144 | 18411 | 80 | 3.00E−93 | gb\|AAD20668.1\|ethylene reponse factor- | CS | HS | | | |
| | | | | like AP2 domain transcription factor | | | | | |
| | | | | [Arabidopsis thaliana] | | | | | |
| 145 | 70737 | 100 | 0 | ref\|NP_564265.1\|unknown protein | CS | HS | SS | | |
| | | | | [Arabidopsis thaliana] | | | | | |
| 146 | 18315 | 72 | 3.00E−90 | ref\|NP_196054.1\|C2H2; nucleic acid | SS | PEG | | | |
| | | | | binding/transcription factor/zinc ion | | | | | |
| | | | | binding [Arabidopsis thaliana] | | | | | |
| 147 | 75080 | 94 | 1.00E−117 | ref\|NP_179033.1\|ANR1; DNA binding/ | HS | PEG | | | |
| | | | | transcription factor [Arabidopsis thaliana] | | | | | |
| 148 | 19191 | 71 | 6.00E−68 | gb\|AAK76521.1\|putative Dof zinc finger | SS | | | | |
| | | | | protein [Arabidopsis thaliana] | | | | | |
| 149 | 18431 | 90 | 0 | ref\|NP_192961.1\|nucleic acid binding/ | LN | | | | |
| | | | | transcription factor/zinc ion binding | | | | | |
| | | | | [Arabidopsis thaliana] | | | | | |
| 150 | 18433 | 89 | 1.00E−163 | ref\|NP_195443.1\|MYB73; DNA binding/ | SP | | | | |
| | | | | transcription factor [Arabidopsis thaliana] | | | | | |
| 151 | 18434 | 72 | 1.00E−122 | ref\|NP_195758.1\|transcription factor | HS | | | | |
| | | | | [Arabidopsis thaliana] | | | | | |
| 152 | 19536 | 93 | 0 | ref\|NP_568099.1/MYB3R-5; DNA binding/ | PEG | | | | |
| | | | | transcription factor [Arabidopsis thaliana] | | | | | |
| 153 | 76577 | 93 | 8.00E−84 | ref\|NP_180991.1\|transcription factor | PEG | | | | |
| | | | | [Arabidopsis thaliana] | | | | | |
| 154 | 11113 | 92 | 0 | ref\|NP_565621.1\|PEX10; protein binding/ | CS | | | | |
| | | | | ubiquitin-protein ligase/zinc ion binding | | | | | |
| | | | | [Arabidopsis thaliana] | | | | | |
| 155 | 19614 | 100 | 1.00E−84 | ref\|NP_566925.1\|DNA binding/ | PEG | | | | |
| | | | | transcription factor [Arabidopsis thaliana] | | | | | |
| 156 | 18204 | 85 | 0 | ref\|NP_001031255.1\|unknown protein | CK | | | | |
| | | | | [Arabidopsis thaliana] | | | | | |
| 157 | 73614 | 96 | 0 | ref\|NP_186995.1\|RGL2 (RGA-LIKE 2); | CS | HS | | | |
| | | | | transcription factor [Arabidopsis thaliana] | | | | | |
| 158 | 70450 | 76 | 1.00E−138 | ref\|NP_187687.1\|DNA binding/ | CS | HS | | | |
| | | | | transcription factor [Arabidopsis thaliana] | | | | | |
| 159 | 70618 | 94 | 0 | ref\|NP_188000.1\|transcription factor | HS | SS | | | |
| | | | | [Arabidopsis thaliana] | | | | | |
| 160 | 70458 | 95 | 0 | ref\|NP_172779.1\|unknown protein | LL | | | | |
| | | | | [Arabidopsis thaliana] | | | | | |
| 161 | 71306 | 81 | 0 | ref\|NP_195480.1\|SHR (SHORT ROOT); | CS | HS | SP | PEG | |
| | | | | transcription factor [Arabidopsis thaliana] | | | | | |
| 162 | 70451 | 92 | 1.00E−141 | ref\|NP_195810.2\|WRKY62; transcription | SS | | | | |
| | | | | factor [Arabidopsis thaliana] | | | | | |
| 163 | 70453 | 71 | 1.00E−154 | ref\|NP_201032.2\|DNA binding | CS | | | | |
| | | | | [Arabidopsis thaliana] | | | | | |
| 164 | 71311 | 89 | 0 | ref\|NP_176498.1\|transcription factor | CS | LN | | | |
| | | | | [Arabidopsis thaliana] | | | | | |
| 165 | 76533 | 91 | 0 | gb\|ABK28765.1\|unknown [Arabidopsis | HS | | | | |
| | | | | thaliana] | | | | | |
| 166 | 70955 | 87 | 1.00E−178 | gb\|AAX21351.1\|phantastica transcription | SP | | | | |
| | | | | factor a [Glycine max] | | | | | |
| 167 | 77708 | 57 | 1.00E−64 | ref\|NP_200279.1\|DNA binding/ | DS | | | | |
| | | | | transcription factor [Arabidopsis thaliana] | | | | | |
| 168 | 70954 | 61 | 9.00E−72 | emb\|CAB77055.1\|putative TFIIIA (or | LN | PEG | | | |
| | | | | kruppel)-like zinc finger protein [Medicago | | | | | |
| | | | | sativa subsp. × varia] | | | | | |
| 169 | 19742 | 86 | 1.00E−156 | gb\|AAK84883.1\|AF402602_1NAC domain | CS | | | | |
| | | | | protein NAC1 [Phaseolus vulgaris] | | | | | |
| 170 | 70960 | 53 | 1.00E−72 | ref\|NP_565183.1\|transcription factor/zinc | PEG | | | | |
| | | | | ion binding [Arabidopsis thaliana] | | | | | |
| 171 | 19940 | 94 | 0 | gb\|ABH02845.1\|MYB transcription factor | PEG | | | | |
| | | | | MYB93 [Glycine max] | | | | | |
| 172 | 70921 | 88 | 1.00E−156 | gb\|AAX85979.1\|NAC2 protein [Glycine | CS | CK | | | |
| | | | | max] | | | | | |
| 173 | 70953 | 83 | 1.00E−121 | gb\|ABI97244.1\|PHD5 [Glycine max] | DS | PP | SS | PEG | |
| 174 | 70978 | 99 | 1.00E−134 | emb\|CAI47596.1\|MADS transcription factor | HS | PEG | | | |
| | | | | [Glycine max] | | | | | |
| 175 | 70940 | 47 | 1.00E−97 | ref\|NP_191362.2\|protein binding/ | SS | | | | |
| | | | | ubiquitin-protein ligase/zinc ion binding | | | | | |
| | | | | [Arabidopsis thaliana] | | | | | |
| 176 | 70977 | 57 | 8.00E−76 | ref\|NP_567245.1\|DNA binding/ | HS | | | | |
| | | | | transcription factor [Arabidopsis thaliana] | | | | | |
| 177 | 70993 | 92 | 1.00E−105 | gb\|AAX13302.1\|MADS box protein AP3- | CS | SS | | | |
| | | | | like [Lotus corniculatus var. japonicus] | | | | | |
| 178 | 19762 | 98 | 2.00E−36 | gb\|ABH02867.1\|MYB transcription factor | HS | PP | | | |
| | | | | MYB142 [Glycine max] | | | | | |
| 179 | 70938 | 47 | 2.00E−63 | dbj\|BAB16432.1\|WRKY transcription | CS | HS | PP | PEG | |
| | | | | factor NtEIG-D48 [Nicotiana tabacum] | | | | | |
| 180 | 78653 | 100 | 1.00E−114 | ref\|NP_199999.1\|transcription factor | LL | LN | | | |
| | | | | [Arabidopsis thaliana] | | | | | |
| 181 | 73216 | 99 | 0 | ref\|NP_189228.1\|transcription factor | LL | | | | |
| | | | | [Arabidopsis thaliana] | | | | | |
| 182 | 71139 | 91 | 1.00E−152 | ref\|NP_187669.1\|DNA binding/ | LN | | | | |
| | | | | transcription factor [Arabidopsis thaliana] | | | | | |
| 183 | 74227 | 74 | 1.00E−174 | ref\|NP_187615.2\|transcription factor | LL | | | | |
| | | | | [Arabidopsis thaliana] | | | | | |
| 184 | 70678 | 91 | 1.00E−142 | ref\|NP_173195.2\|DNA binding/ | LN | LL | | | |
| | | | | transcription factor [Arabidopsis thaliana] | | | | | |
| 185 | 70769 | 90 | 1.00E−148 | ref\|NP_194286.1\|DNA binding/ | LL | | | | |
| | | | | transcription factor [Arabidopsis thaliana] | | | | | |
| 186 | 71643 | 83 | 1.00E−141 | gb\|ABH02851.1\|MYB transcription factor | LL | LN | | | |
| | | | | MYB109 [Glycine max] | | | | | |
| 187 | 70242 | 93 | 0 | ref\|NP_565162.1\|calmodulin binding/ | DS | | | | |
| | | | | transcription factor [Arabidopsis thaliana] | | | | | |
| 188 | 12325 | 94 | 1.00E−164 | ref\|NP_191684.1\|DNA binding/ | LN | | | | |
| | | | | transcription factor [Arabidopsis thaliana] | | | | | |
| 189 | 70356 | 95 | 1.00E−114 | gb\|AAX13306.1\|MADS box protein AGL11 | DS | | | | |
| | | | | [Lotus corniculatus var. japonicus] | | | | | |
| 190 | 72034 | 72 | 3.00E−90 | gb\|AAX69070.1\|MADS box protein M8 | LL | | | | |
| | | | | [Pisum sativum] | | | | | |
| 191 | 72046 | 57 | 1.00E−64 | dbj\|BAD15085.1\|CCAAT-box binding | CS | PP | SS | | |
| | | | | factor HAP5 homolog [Daucus carota] | | | | | |
| 192 | 72071 | 76 | 1.00E−79 | sp\|P32294\|AX22B_PHAAUAuxin-induced | PEG | | | | |
| | | | | protein 22B (Indole-3-acetic acid-induced | | | | | |
| | | | | protein ARG4) dbj\|BAA03309.1\|ORF | | | | | |
| | | | | [Vigna radiata] | | | | | |
| 193 | 72116 | 93 | 1.00E−123 | dbj\|BAB86892.1\|syringolide-induced | HS | LN | SS | | |
| | | | | protein 1-3-1A [Glycine max] | | | | | |
| 194 | 72108 | 82 | 1.00E−87 | gb\|ABK58464.1\|LIM domain protein | LL | | | | |
| | | | | GLIM1a [Populus tremula × Populus alba] | | | | | |
| 195 | 77605 | 99 | 0 | gb\|ABE65879.1\|zinc finger family protein | CK | HS | LL | PEG | PP |
| | | | | [Arabidopsis thaliana] | | | | | |
| 196 | 73978 | 90 | 0 | ref\|NP_179919.1\|CLF (CURLY LEAF); | SS | PEG | | | |
| | | | | transcription factor [Arabidopsis thaliana] | | | | | |
| 197 | 73032 | 69 | 1.00E−115 | gb\|ABI34669.1\|bZIP transcription factor | LL | | | | |
| | | | | bZIP131 [Glycine max] | | | | | |
| 198 | 11157 | 96 | 0 | ref\|NP_177279.1\|AJH2 [Arabidopsis | LN | | | | |
| | | | | thaliana] | | | | | |
| 199 | 73493 | 97 | 0 | ref\|NP_010736.1\|Ada2p [Saccharomyces | PEG | | | | |
| | | | | cerevisiae] | | | | | |
| 200 | 71228 | 93 | 1.00E−135 | ref\|NP_565948.1\|EEL (ENHANCED EM | CK | | | | |
| | | | | LEVEL); DNA binding/transcription | | | | | |
| | | | | factor [Arabidopsis thaliana] | | | | | |
| 201 | 74889 | 64 | 1.00E−118 | gb\|ABE82375.1\|Transcription factor | CS | | | | |
| | | | | E2F/dimerisation partner (TDP) [Medicago | | | | | |
| | | | | truncatula] | | | | | |
| 202 | 74854 | 75 | 1.00E−115 | gb\|ABH02826.1\|MYB transcription factor | LN | | | | |
| | | | | MYB55 [Glycine max] | | | | | |
| 203 | 74891 | 88 | 1.00E−67 | gb\|AAL31068.1\|AC090120_14putative c- | CS | DS | LN | | |
| | | | | myc binding protein [Oryza sativa] | | | | | |
| 204 | 75314 | 51 | 5.00E−71 | ref\|NP_181828.1\|ANAC042; transcription | DS | LN | | | |
| | | | | factor [Arabidopsis thaliana] | | | | | |
| 205 | 75340 | 66 | 3.00E−88 | emb\|CAA63222.1\|homeobox-leucine zipper | LL | | | | |
| | | | | protein [Glycine max] | | | | | |
| 206 | 75329 | 91 | 1.00E−62 | ref\|NP_001062531.1\|Os08g0564500 [Oryza | PEG | | | | |
| | | | | sativa (japonica cultivar-group)] | | | | | |
| 207 | 75453 | 81 | 1.00E−140 | gb\|ABH02828.1\|MYB transcription factor | HS | LN | | | |
| | | | | MYB57 [Glycine max] | | | | | |
| 208 | 75477 | 48 | 5.00E−38 | gb\|ABC69353.1\|ethylene-responsive | LL | PEG | | | |
| | | | | element-binding protein [Medicago | | | | | |
| | | | | truncatula] | | | | | |
| 209 | 75430 | 69 | 9.00E−30 | emb\|CAC28528.1\|GATA-1 zinc finger | LL | LN | PEG | | |
| | | | | protein [Nicotiana tabacum] | | | | | |
| 210 | 75467 | 43 | 3.00E−30 | gb\|AAM61659.1\|unknown [Arabidopsis | CS | HS | | | |
| | | | | thaliana] | | | | | |
| 211 | 75457 | 72 | 1.00E−89 | gb\|AAX69065.1\|MADS box protein M2 | PP | SP | | | |
| | | | | [Pisum sativum] | | | | | |
| 212 | 75469 | 91 | 1.00E−143 | gb\|ABI34650.1\|bZIP transcription factor | SP | | | | |
| | | | | bZIP68 [Glycine max] | | | | | |
| 213 | 75470 | 74 | 2.00E−44 | gb\|AAP13348.1\|transcription factor GT-3b | HS | PP | | | |
| | | | | [Arabidopsis thaliana] | | | | | |
| 214 | 75435 | 71 | 1.00E−28 | ref\|NP_566164.1\|PTF1 (PLASTID | DS | | | | |
| | | | | TRANSCRIPTION FACTOR 1); | | | | | |
| | | | | transcription factor [Arabidopsis thaliana] | | | | | |
| 215 | 77822 | 61 | 2.00E−75 | gb\|AAN05420.1\|putative RING protein | DS | LL | | | |
| | | | | [Populus × canescens] | | | | | |
| 216 | 75505 | 49 | 1.00E−172 | gb\|ABI30334.1\|Cys-3-His zinc finger | PP | | | | |
| | | | | protein [Capsicum annuum] | | | | | |
| 217 | 75589 | 56 | 1.00E−115 | gb\|ABE81808.1\|Homeodomain-related | LN | | | | |
| | | | | [Medicago truncatula] | | | | | |
| 218 | 75542 | 69 | 9.00E−83 | gb\|ABE78575.1\|TCP transcription factor | LN | SP | | | |
| | | | | [Medicago truncatula] | | | | | |
| 219 | 75545 | 42 | 2.00E−36 | gb\|AAQ56115.1\|transcription-factor-like | SS | | | | |
| | | | | protein [Boechera drummondii] | | | | | |
| 220 | 75581 | 44 | 1.00E−89 | ref\|NP_189124.1\|PRT1 (PROTEOLYSIS | LL | | | | |
| | | | | 1); ubiquitin-protein ligase [Arabidopsis | | | | | |
| | | | | thaliana] | | | | | |
| 221 | 75524 | 50 | 1.00E−106 | ref\|NP_176980.1\|nucleic acid binding/ | LN | | | | |
| | | | | transcription factor/zinc ion binding | | | | | |
| | | | | [Arabidopsis thaliana] | | | | | |
| 222 | 75658 | 49 | 6.00E−29 | gb\|AAV85852.1\|AT-rich element binding | LL | | | | |
| | | | | factor 2 [Pisum sativum] | | | | | |
| 223 | 75738 | 67 | 6.00E−68 | gb\|AAM33103.2\|TAGL12 transcription | LL | SP | | | |
| | | | | factor [Lycopersicon esculentum] | | | | | |
| 224 | 77356 | 94 | 1.00E−119 | ref\|NP_564547.1\|RTV1; DNA binding/ | LL | | | | |
| | | | | transcription factor [Arabidopsis thaliana] | | | | | |
| 225 | 77362 | 100 | 3.00E−73 | ref\|NP_193892.1\|LOL2 (LSD ONE LIKE | DS | | | | |
| | | | | 2); transcription factor [Arabidopsis | | | | | |
| | | | | thaliana] | | | | | |
| 226 | 77363 | 67 | 1.00E−47 | ref\|NP_194747.1\|transcription factor/ | LN | | | | |
| | | | | transcription regulator [Arabidopsis | | | | | |
| | | | | thaliana] | | | | | |
| 227 | 77371 | 95 | 1.00E−127 | ref\|NP_199178.1\|DNA binding/ | CS | | | | |
| | | | | transcription factor [Arabidopsis thaliana] | | | | | |
| 228 | 77941 | 90 | 1.00E−140 | dbj\|BAB09311.1\|tumor-related protein-like | DS | SS | | | |
| | | | | [Arabidopsis thaliana] | | | | | |

### Trait Enhancement Screens

[0100] DS-Enhancement of drought tolerance identified by a soil drought stress tolerance screen: Drought or water deficit conditions impose mainly osmotic stress on plants. Plants are particularly vulnerable to drought during the flowering stage. The drought condition in the screening process disclosed in Example 1B started from the flowering time and was sustained to the end of harvesting. The present invention provides recombinant DNA that can improve the plant survival rate under such sustained drought condition. Exemplary recombinant DNA for conferring such drought tolerance are identified as such in Table 3. Such recombinant DNA can be used in generating transgenic plants that are tolerant to the drought condition imposed during flowering time and in other stages of the plant life cycle. As demonstrated from the model plant screen, in some embodiments of transgenic plants with trait-improving recombinant DNA grown under such sustained drought condition can also have increased total seed weight per plant in addition to the increased survival rate within a transgenic population, providing a higher yield potential as compared to control plants.

[0101] PEG-Enhancement of drought tolerance identified by PEG induced osmotic stress tolerance screen: Various drought levels can be artificially induced by using various concentrations of polyethylene glycol (PEG) to produce different osmotic potentials (Pilon-Smits e.g., (1995) Plant Physiol. 107:125-130). Several physiological characteristics have been reported as being reliable indications for selection of plants possessing drought tolerance. These characteristics include the rate of seed germination and seedling growth. The traits can be assayed relatively easily by measuring the growth rate of seedling in PEG solution. Thus, a PEG-induced osmotic stress tolerance screen is a useful surrogate for drought tolerance screen. As demonstrated from the model plant screen, embodiments of transgenic plants with trait-improving recombinant DNA identified in the PEG-induced osmotic stress tolerance screen can survive better drought conditions providing a higher yield potential as compared to control plants.

[0102] SS-Enhancement of drought tolerance identified by high salinity stress tolerance screen: Three different factors are responsible for salt damages: (1) osmotic effects, (2) disturbances in the mineralization process, and (3) toxic effects caused by the salt ions, e.g., inactivation of enzymes. While the first factor of salt stress results in the wilting of the plants that is similar to drought effect, the ionic aspect of salt stress is clearly distinct from drought. The present invention provides genes that help plants maintain biomass, root growth, and/or plant development in high salinity conditions, which are identified as such in Table 3. Since osmotic effect is one of the major components of salt stress, which is common to the drought stress, trait-improving recombinant DNA identified in a high salinity stress tolerance screen can also provide transgenic crops with enhanced drought tolerance. As demonstrated from the model plant screen, embodiments of transgenic plants with trait-improving recombinant DNA identified in a high salinity stress tolerance screen can survive better drought conditions and/or high salinity conditions providing a higher yield potential as compared to control plants.

[0103] HS-Enhancement of drought tolerance identified by heat stress tolerance screen: Heat and drought stress often occur simultaneously, limiting plant growth. Heat stress can cause the reduction in photosynthesis rate, inhibition of leaf growth and osmotic potential in plants. Thus, genes identified by the present invention as heat stress tolerance conferring genes can also impart enhanced drought tolerance to plants. As demonstrated from the model plant screen, embodiments of transgenic plants with trait-improving recombinant DNA identified in a heat stress tolerance screen can survive better heat stress conditions and/or drought conditions providing a higher yield potential as compared to control plants.

[0104] CK and CS-Enhancement of tolerance to cold stress: Low temperature can immediately result in mechanical constraints, changes in activities of macromolecules, and reduced osmotic potential. In the present invention, two screening conditions, i.e., cold shock tolerance screen (CK) and cold germination tolerance screen (CS), were set up to look for transgenic plants that display visual growth advantage at lower temperature. In cold germination tolerance screen, the transgenic Arabidopsis plants were exposed to a constant temperature of 8° C. from planting until day 28 post plating. The trait-improving recombinant DNA identified by such screen are particular useful for the production of transgenic plant that can germinate more robustly in a cold temperature as compared to the wild type plants. In cold shock tolerance screen, the transgenic plants were first grown under the normal growth temperature of 22° C. until day 8 post plating, and subsequently were placed under 8° C. until day 28 post plating. As demonstrated from the model plant screen, embodiments of transgenic plants with trait-improving recombinant DNA identified in a cold shock stress tolerance screen and/or a cold germination stress tolerance screen can survive better cold conditions providing a higher yield potential as compared to control plants.

[0105] Enhancement of tolerance to multiple stresses: Different kinds of stresses often lead to identical or similar reaction in the plants. Genes that are activated or inactivated as a reaction to stress can either act directly in a way the genetic product reduces a specific stress, or they can act indirectly by activating other specific stress genes. By manipulating the activity of such regulatory genes, i.e., multiple stress tolerance genes, the plant can be enabled to react to different kinds of stresses. For examples, PEP SEQ ID NO: 116 can be used to enhance both salt stress tolerance and cold stress tolerance in plants. Of particular interest, plants transformed with PEP SEQ ID NO: 133 can resist salt stress and cold stress. Plants transformed with PEP SEQ ID NO: 133 can also improve growth in early stage and under osmotic stress. In addition to these multiple stress tolerance genes, the stress tolerance conferring genes provided by the present invention can be used in combinations to generate transgenic plants that can resist multiple stress conditions.

[0106] PP-Enhancement of early plant growth and development: It has been known in the art that to minimize the impact of disease on crop profitability, it is important to start the season with healthy and vigorous plants. This means avoiding seed and seedling diseases, leading to increased nutrient uptake and increased yield potential. Traditionally early planting and applying fertilizer are the methods used for promoting early seedling vigor. In early development stage, plant embryos establish only the basic root-shoot axis, a cotyledon storage organ(s), and stem cell populations, called the root and shoot apical meristems that continuously generate new organs throughout post-embryonic development. “Early growth and development” used herein encompasses the stages of seed imbibition through the early vegetative phase. The present invention provides genes that are useful to produce transgenic plants that have advantages in one or more processes including, but not limited to, germination, seedling vigor, root growth and root morphology under non-stressed conditions. The transgenic plants starting from a more robust seedling are less susceptible to the fungal and bacterial pathogens that attach germinating seeds and seedling. Furthermore, seedlings with advantage in root growth are more resistant to drought stress due to extensive and deeper root architecture. Therefore, it can be recognized by those skilled in the art that genes conferring the growth advantage in early stages to plants can also be used to generate transgenic plants that are more resistant to various stress conditions due to enhanced early plant development. The present invention provides such exemplary recombinant DNA that confer both the stress tolerance and growth advantages to plants, identified as such in Table 3, e.g., PEP SEQ ID NO: 126 which can improve the plant early growth and development, and impart salt tolerance to plants. As demonstrated from the model plant screen, embodiments of transgenic plants with trait-improving recombinant DNA identified in the early plant development screen can grow better under non-stress conditions and/or stress conditions providing a higher yield potential as compared to control plants.

[0107] SP-Enhancement of late plant growth and development: “Late growth and development” used herein encompasses the stages of leaf development, flower production, and seed maturity. In certain embodiments, transgenic plants produced using genes that confer growth advantages to plants provided by the present invention, identified as such in Table 3, exhibit at least one phenotypic characteristics including, but not limited to, increased rosette radius, increased rosette dry weight, seed dry weight, silique dry weight, and silique length. On one hand, the rosette radius and rosette dry weight are used as the indexes of photosynthesis capacity, and thereby plant source strength and yield potential of a plant. On the other hand, the seed dry weight, silique dry weight and silique length are used as the indexes for plant sink strength, which are considered as the direct determinants of yield. As demonstrated from the model plant screen, embodiments of transgenic plants with trait-improving recombinant DNA identified in the late development screen can grow better and/or have enhanced development during leaf development and seed maturation providing a higher yield potential as compared to control plants.

[0108] LL-Enhancement of tolerance to shade stress identified in a low light screen: The effects of light on plant development are especially prominent at the seedling stage. Under normal light conditions with unobstructed direct light, a plant seeding develops according to a characteristic photomorphogenic pattern, in which plants have open and expanded cotyledons and short hypocotyls. Then the plant's energy is devoted to cotyledon and leaf development while longitudinal extension growth is minimized. Under low light condition where light quality and intensity are reduced by shading, obstruction or high population density, a seedling displays a shade-avoidance pattern, in which the seedling displays a reduced cotyledon expansion, and hypocotyls extension is greatly increased. As the result, a plant under low light condition increases significantly its stem length at the expanse of leaf, seed or fruit and storage organ development, thereby adversely affecting of yield. The present invention provides recombinant DNA that enable plants to have an attenuated shade avoidance response so that the source of plant can be contributed to reproductive growth efficiently, resulting higher yield as compared to the wild type plants. As demonstrated from the model plant screen, embodiments of transgenic plants with trait-improving recombinant DNA identified in a shade stress tolerance screen can have attenuated shade response under shade conditions providing a higher yield potential as compared to control plants. The transgenic plants generated by the present invention can be suitable for a higher density planting, thereby resulting increased yield per unit area.

[0109] LN-Enhancement of Tolerance to Low Nitrogen Availability Stress

[0110] Nitrogen is a key factor in plant growth and crop yield. The metabolism, growth and development of plants are profoundly affected by their nitrogen supply. Restricted nitrogen supply alters shoot to root ratio, root development, activity of enzymes of primary metabolism and the rate of senescence (death) of older leaves. All field crops have a fundamental dependence on inorganic nitrogenous fertilizer. Since fertilizer is rapidly depleted from most soil types, it must be supplied to growing crops two or three times during the growing season. Enhanced nitrogen use efficiency by plants should enable crops cultivated under low nitrogen availability stress condition resulted from low fertilizer input or poor soil quality.

[0111] This invention demonstrates that the transgenic plants generated using the recombinant nucleotides, which confer enhanced nitrogen use efficiency, identified as such in Table 3, exhibit one or more desirable traits including, but not limited to, increased seedling weight, greener leaves, increased number of rosette leaves, increased or decreased root length. One skilled in the art can recognize that the transgenic plants provided by the present invention with enhanced nitrogen use efficiency can also have altered amino acid or protein compositions, increased yield and/or better seed quality. The transgenic plants of the present invention can be productively cultivated under low nitrogen growth conditions, i.e., nitrogen-poor soils and low nitrogen fertilizer inputs, which would cause the growth of wild type plants to cease or to be so diminished as to make the wild type plants practically useless. The transgenic plants also can be advantageously used to achieve earlier maturing, faster growing, and/or higher yielding crops and/or produce more nutritious foods and animal feedstocks when cultivated using nitrogen non-limiting growth conditions.

[0112] Stacked Traits: The present invention also encompasses transgenic plants with stacked engineered traits, e.g., a crop having an enhanced phenotype resulting from expression of a trait-improving recombinant DNA, in combination with herbicide and/or pest resistance traits. For example, genes of the current invention can be stacked with other traits of agronomic interest, such as a trait providing herbicide resistance, for example a RoundUp Ready® trait, or insect resistance, such as using a gene from Bacillus thuringensis to provide resistance against lepidopteran, coliopteran, homopteran, hemiopteran, and other insects. Herbicides for which resistance is useful in a plant include glyphosate herbicides, phosphinothricin herbicides, oxynil herbicides, imidazolinone herbicides, dinitroaniline herbicides, pyridine herbicides, sulfonylurea herbicides, bialaphos herbicides, sulfonamide herbicides and gluphosinate herbicides. To illustrate that the production of transgenic plants with herbicide resistance is a capability of those of ordinary skill in the art, reference is made to U.S. patent application publications 2003/0106096A1 and 2002/0112260A1 and U.S. Pat. Nos. 5,034,322; 5,776,760, 6,107,549 and 6,376,754, all of which are incorporated herein by reference. To illustrate that the production of transgenic plants with pest resistance is a capability of those of ordinary skill in the art, reference is made to U.S. Pat. Nos. 5,250,515 and 5,880,275 which disclose plants expressing an endotoxin of Bacillus thuringiensis bacteria, to U.S. Pat. No. 6,506,599 which discloses control of invertebrates which feed on transgenic plants which express dsRNA for suppressing a target gene in the invertebrate, to U.S. Pat. No. 5,986,175 which discloses the control of viral pests by transgenic plants which express viral replicase, and to U.S. Patent Application Publication 2003/0150017 A1 which discloses control of pests by a transgenic plant which express a dsRNA targeted to suppressing a gene in the pest, all of which are incorporated herein by reference.

[0113] Once one recombinant DNA has been identified as conferring an enhanced trait of interest in transgenic Arabidopsis plants, several methods are available for using the sequence of that recombinant DNA and knowledge about the protein it encodes to identify homologs of that sequence from the same plant or different plant species or other organisms, e.g., bacteria and yeast. Thus, in one aspect, the invention provides methods for identifying a homologous gene with a DNA sequence homologous to any of SEQ ID NO: 1 through SEQ ID NO: 114, or a homologous protein with an amino acid sequence homologous to any of SEQ ID NO: 115 through SEQ ID NO: 228. In another aspect, the present invention provides the protein sequences of identified homologs for a sequence listed as SEQ ID NO: 229 through SEQ ID NO: 4815. In yet another aspect, the present invention also includes linking or associating one or more desired traits, or gene function with a homolog sequence provided herein.

[0114] The trait-improving recombinant DNA and methods of using such trait-improving recombinant DNA for generating transgenic plants with enhanced traits provided by the present invention are not limited to any particular plant species. Indeed, the plants according to the present invention can be of any plant species, i.e., can be monocotyledonous or dicotyledonous. In one embodiment, they will be agricultural useful plants, i.e., plants cultivated by man for purposes of food production or technical, particularly industrial applications. Of particular interest in the present invention are corn and soybean plants. The recombinant DNA constructs optimized for soybean transformation and recombinant DNA constructs optimized for corn transformation are provided by the present invention. Other plants of interest in the present invention for production of transgenic plants having enhanced traits include, without limitation, cotton, canola, wheat, sunflower, sorghum, alfalfa, barley, millet, rice, tobacco, fruit and vegetable crops, and turfgrass.

[0115] In certain embodiments, the present invention contemplates to use an orthologous gene in generating the transgenic plants with similarly enhanced traits as the transgenic Arabidopsis counterpart. Enhanced physiological properties in transgenic plants of the present invention can be confirmed in responses to stress conditions, for example in assays using imposed stress conditions to detect enhanced responses to drought stress, nitrogen deficiency, cold growing conditions, or alternatively, under naturally present stress conditions, for example under field conditions. Biomass measures can be made on greenhouse or field grown plants and can include such measurements as plant height, stem diameter, root and shoot dry weights, and, for corn plants, ear length and diameter.

[0116] Trait data on morphological changes can be collected by visual observation during the process of plant regeneration as well as in regenerated plants transferred to soil. Such trait data includes characteristics such as normal plants, bushy plants, taller plants, thicker stalks, narrow leaves, striped leaves, knotted phenotype, chlorosis, albino, anthocyanin production, or altered tassels, ears or roots. Other enhanced traits can be identified by measurements taken under field conditions, such as days to pollen shed, days to silking, leaf extension rate, chlorophyll content, leaf temperature, stand, seedling vigor, internode length, plant height, leaf number, leaf area, tillering, brace roots, stay green, stalk lodging, root lodging, plant health, barreness/prolificacy, green snap, and pest resistance. In addition, trait characteristics of harvested grain can be confirmed, including number of kernels per row on the ear, number of rows of kernels on the ear, kernel abortion, kernel weight, kernel size, kernel density and physical grain quality.

[0117] To confirm hybrid yield in transgenic corn plants expressing genes of the present invention, it can be desirable to test hybrids over multiple years at multiple locations in a geographical location where maize is conventionally grown, e.g., in Iowa, Illinois or other locations in the midwestern United States, under “normal” field conditions as well as under stress conditions, e.g., under drought or population density stress.

[0118] Transgenic plants can be used to provide plant parts according to the invention for regeneration or tissue culture of cells or tissues containing the constructs described herein. Plant parts for these purposes can include leaves, stems, roots, flowers, tissues, epicotyl, meristems, hypocotyls, cotyledons, pollen, ovaries, cells and protoplasts, or any other portion of the plant which can be used to regenerate additional transgenic plants, cells, protoplasts or tissue culture. Seeds of transgenic plants are provided by this invention can be used to propagate more plants containing the trait-improving recombinant DNA constructs of this invention. These descendants are intended to be included in the scope of this invention if they contain a trait-improving recombinant DNA construct of this invention, whether or not these plants are selfed or crossed with different varieties of plants.

[0119] The various aspects of the invention are illustrated by means of the following examples which are in no way intended to limit the full breath and scope of claims.

### EXAMPLES

### Example 1

### Identification of Recombinant DNA that Confers Enhanced Trait(s) to Plants

### A. Plant Expression Constructs for Arabidopsis Transformation

[0120] Each gene of interest was amplified from a genomic or cDNA library using primers specific to sequences upstream and downstream of the coding region. Transformation vectors were prepared to constitutively transcribe DNA in either sense orientation (for enhanced protein expression) or anti-sense orientation (for endogenous gene suppression) under the control of an enhanced Cauliflower Mosaic Virus 35S promoter (U.S. Pat. No. 5,359,142) directly or indirectly (Moore, e.g., PNAS 95:376-381, 1998; Guyer, e.g., Genetics 149: 633-639, 1998; International patent application NO. PCT/EP98/07577). The transformation vectors also contain a bar gene as a selectable marker for resistance to glufosinate herbicide. The transformation of Arabidopsis plants was carried out using the vacuum infiltration method known in the art (Bethtold, e.g., Methods Mol. Biol. 82:259-66, 1998). Seeds harvested from the plants, named as T1 seeds, were subsequently grown in a glufosinate-containing selective medium to select for plants which were actually transformed and which produced T2 transgenic seed.

### B. Soil Drought Tolerance Screen

[0121] This example describes a soil drought tolerance screen to identify Arabidopsis plants transformed with recombinant DNA that wilt less rapidly and/or produce higher seed yield when grown in soil under drought conditions

[0122] T2 seeds were sown in flats filled with Metro/Mix® 200 (The Scotts® Company, USA). Humidity domes were added to each flat and flats were assigned locations and placed in climate-controlled growth chambers. Plants were grown under a temperature regime of 22° C. at day and 20° C. at night, with a photoperiod of 16 hours and average light intensity of 170 μmol/m²/s. After the first true leaves appeared, humidity domes were removed. The plants were sprayed with glufosinate herbicide and put back in the growth chamber for 3 additional days. Flats were watered for 1 hour the week following the herbicide treatment. Watering was continued every seven days until the flower bud primordia became apparent, at which time plants were watered for the last time.

[0123] To identify drought tolerant plants, plants were evaluated for wilting response and seed yield. Beginning ten days after the last watering, plants were examined daily until 4 plants/line had wilted. In the next six days, plants were monitored for wilting response. Five drought scores were assigned according to the visual inspection of the phenotypes: 1 for healthy, 2 for dark green, 3 for wilting, 4 severe wilting, and 5 for dead. A score of 3 or higher was considered as wilted.

[0124] At the end of this assay, seed yield measured as seed weight per plant under the drought condition was characterized for the transgenic plants and their controls and analyzed as a quantitative response according to example 1M.

[0125] Two approaches were used for statistical analysis on the wilting response. First, the risk score was analyzed for wilting phenotype and treated as a qualitative response according to the example 1L. Alternatively, the survival analysis was carried out in which the proportions of wilted and non-wilted transgenic and control plants were compared over each of the six days under scoring and an overall log rank test was performed to compare the two survival curves using S-PLUS statistical software (S-PLUS 6, Guide to statistics, Insightful, Seattle, Wash., USA). A list of recombinant DNA constructs which improve drought tolerance in transgenic plants is illustrated in Table 4

TABLE 4

| | | | | | | | Time to | |
|---|---|---|---|---|---|---|---|---|
| | | | | | | | wilting | |
| PEP | | | Drought score | | Seed yield | | Risk | |
| SEQ | Construct | | Delta | | Delta | | score | |
| ID NO | ID | Orientation | mean | P-value | mean | P-value | mean | P-value |
| 187 | 70242 | SENSE | 0.034 | 0.539 | 0.783 | 0.029 | −0.047 | 1.000 |
| 189 | 70356 | SENSE | −0.170 | 0.013 | 0.193 | 0.053 | −0.170 | 1.000 |
| 176 | 70977 | SENSE | 0.010 | 0.815 | 0.652 | 0.015 | 0.115 | 1.000 |
| 214 | 75435 | SENSE | 0.312 | 0.021 | −2.969 | 0.004 | 0.248 | 1.000 |
| 225 | 77362 | SENSE | 0.076 | 0.310 | 0.420 | 0.068 | 0.060 | 0.920 |
| 167 | 77708 | SENSE | 0.172 | 0.072 | 0.342 | 0.017 | −0.038 | 0.064 |
| 129 | 72078 | SENSE | 1.794 | 0.006 | / | / | / | / |

Transgenic plants including recombinant DNA expressing protein as set forth in SEQ ID NO: 127, 173, 203, 204, 215, or 228 showed enhanced drought tolerance by the second criterial as illustrated in Example 1L.

### C. Heat Stress Tolerance Screen

[0126] Under high temperatures, Arabidopsis seedlings become chlorotic and root growth is inhibited. This example sets forth the heat stress tolerance screen to identify Arabidopsis plants transformed with the gene of interest that are more resistant to heat stress based on primarily their seedling weight and root growth under high temperature.

[0127] T2 seeds were plated on ½×MS salts, 1% phytagel, with 10 μg/ml BASTA (7 per plate with 2 control seeds; 9 seeds total per plate). Plates were placed at 4° C. for 3 days to stratify seeds. Plates were then incubated at room temperature for 3 hours and then held vertically for 11 additional days at temperature of 34° C. at day and 20° C. at night. Photoperiod was 16 h. Average light intensity was ˜140 μmol/m²/s. After 14 days of growth, plants were scored for glufosinate resistance, root length, final growth stage, visual color, and seedling fresh weight. A photograph of the whole plate was taken on day 14.

[0128] The seedling weight and root length were analyzed as quantitative responses according to example 1M. The final grow stage at day 14 was scored as success if 50% of the plants had reached 3 rosette leaves and size of leaves are greater than 1 mm (Boyes, e.g., (2001) The Plant Cell 13, 1499-1510). The growth stage data was analyzed as a qualitative response according to example 1L. A list of recombinant DNA constructs that improve heat tolerance in transgenic plants illustrated in Table 5.

TABLE 5

| | | | | | | | Seedling | |
|---|---|---|---|---|---|---|---|---|
| PEP | | | Root length | | Growth stage | | weight | |
| SEQ ID | Construct | | at day 14 | | at day 14 | | at day 14 | |
| NO | ID | Orientation | Delta | P-value | Risk | P-value | Delta | P-value |
| 126 | 75090 | SENSE | 0.094 | 0.410 | 0.839 | 0.296 | 1.000 | 0.039 |
| 133 | 18453 | SENSE | 0.253 | 0.045 | 0.233 | 0.359 | 0.884 | 0.009 |
| 136 | 78710 | SENSE | 0.073 | 0.574 | 0.139 | 0.681 | 0.606 | 0.008 |
| 137 | 73606 | SENSE | 0.382 | 0.058 | 1.064 | 0.210 | 1.237 | 0.014 |
| 145 | 70737 | SENSE | −0.007 | 0.935 | 0.185 | 0.048 | 0.838 | 0.019 |
| 147 | 75080 | SENSE | 0.306 | 0.171 | 1.172 | 0.242 | 1.140 | 0.021 |
| 151 | 18434 | SENSE | 0.095 | 0.385 | −0.029 | / | / | 0.030 |
| 157 | 73614 | SENSE | −0.051 | 0.238 | −0.178 | 0.377 | 0.719 | 0.020 |
| 159 | 70618 | SENSE | 0.001 | 0.997 | 1.812 | 0.163 | 0.975 | 0.030 |
| 161 | 71306 | SENSE | 0.379 | 0.004 | 0.145 | 0.426 | 1.542 | 0.004 |
| 165 | 76533 | SENSE | 0.090 | 0.248 | 0.103 | 0.182 | 0.531 | 0.000 |
| 174 | 70978 | SENSE | 0.472 | 0.238 | 1.308 | 0.105 | 1.664 | 0.026 |
| 176 | 70977 | SENSE | 0.337 | 0.015 | 0.999 | 0.304 | 1.193 | 0.004 |
| 178 | 19762 | SENSE | 0.042 | 0.614 | −0.259 | 0.005 | 0.714 | 0.024 |
| 179 | 70938 | SENSE | 0.266 | 0.094 | 0.449 | 0.360 | 1.024 | 0.037 |
| 195 | 77605 | SENSE | 0.167 | 0.087 | 0.648 | 0.392 | 1.254 | 0.012 |
| 207 | 75453 | SENSE | −0.352 | 0.026 | 0.517 | 0.310 | 0.585 | 0.013 |
| 210 | 75467 | SENSE | 0.120 | 0.438 | −0.134 | 0.069 | 1.029 | 0.037 |
| 213 | 75470 | SENSE | 0.225 | 0.143 | −0.030 | 0.600 | 1.135 | 0.017 |
| 158 | 70450 | SENSE | 0.354 | 0.023 | 0.878 | 0.006 | 1.161 | 0.008 |

Transgenic plants comprising recombinant DNA expressing protein as set forth in SEQ ID NO: 122, 134, 144 and 193 showed enhanced heat stress tolerance by the second criterial as illustrated in Example 1L and 1M.

### D. Salt Stress Tolerance Screen

[0129] This example sets forth the high salinity stress screen to identify Arabidopsis plants transformed with the gene of interest that are tolerant to high levels of salt based on their rate of development, root growth and chlorophyll accumulation under high salt conditions.

[0130] T2 seeds were plated on glufosinate selection plates containing 90 mM NaCl and grown under standard light and temperature conditions. All seedlings used in the embodiments were grown at a temperature of 22° C. at day and 20° C. at night, a 16-hour photoperiod, an average light intensity of approximately 120 umol/m². On day 11, plants were measured for primary root length. After 3 more days of growth (day 14), plants were scored for transgenic status, primary root length, growth stage, visual color, and the seedlings were pooled for fresh weight measurement. A photograph of the whole plate was also taken on day 14.

[0131] The seedling weight and root length were analyzed as quantitative responses according to example 1M. The final growth stage at day 14 was scored as success if 50% of the plants reached 3 rosette leaves and size of leaves are greater than 1 mm (Boyes, D. C., et al., (2001), The Plant Cell 13, 1499/1510). The growth stage data was analyzed as a qualitative response according to example 1L. A list of recombinant DNA constructs that improve high salinity tolerance in transgenic plants illustrated in Table 6.

TABLE 6

| | | Root length | | Root length | | Growth stage | | Seedling weight | |
|---|---|---|---|---|---|---|---|---|---|
| PEP | | at day 11 | | at day 14 | | at day 14 | | at day 14 | |
| SEQ | Construct | Delta | | Delta | | Delta | | Delta | |
| ID | ID | mean | P-value | mean | P-value | mean | P-value | mean | P-value |
| 116 | 12155 | 0.207 | 0.258 | 0.297 | 0.020 | 0.691 | 0.256 | 0.622 | 0.012 |
| 141 | 18388 | 0.415 | 0.011 | 0.475 | 0.009 | 0.440 | 0.127 | 0.385 | 0.214 |
| 138 | 18446 | 0.120 | 0.385 | 0.120 | 0.097 | / | / | 0.490 | 0.042 |
| 133 | 18453 | 0.265 | 0.089 | 0.288 | 0.060 | 0.364 | 0.336 | 0.356 | 0.043 |
| 148 | 19191 | 0.024 | 0.383 | 0.104 | 0.019 | 0.210 | 0.466 | −0.197 | 0.034 |
| 162 | 70451 | 0.185 | 0.286 | 0.267 | 0.195 | 0.286 | 0.429 | 0.713 | 0.029 |
| 159 | 70618 | 0.504 | 0.017 | 0.535 | 0.046 | 0.358 | 0.403 | 1.101 | 0.010 |
| 145 | 70737 | 0.141 | 0.157 | 0.216 | 0.038 | 0.983 | 0.236 | 0.323 | 0.208 |
| 175 | 70940 | 0.668 | 0.007 | 0.672 | 0.004 | 3.597 | 0.012 | 1.201 | 0.001 |
| 173 | 70953 | 0.254 | 0.054 | 0.297 | 0.052 | 1.040 | 0.413 | 0.787 | 0.026 |
| 191 | 72046 | 0.236 | 0.010 | 0.168 | 0.000 | 0.502 | 0.184 | 0.215 | 0.177 |
| 137 | 73606 | 0.399 | 0.035 | 0.386 | 0.041 | 0.251 | 0.332 | 0.284 | 0.612 |
| 196 | 73978 | 0.413 | 0.076 | 0.327 | 0.016 | 0.269 | 0.423 | 0.451 | 0.073 |
| 126 | 75090 | 0.466 | 0.024 | 0.507 | 0.012 | 1.340 | 0.154 | 1.092 | 0.036 |
| 219 | 75545 | −0.274 | 0.077 | −0.105 | 0.314 | 0.197 | 0.320 | 0.468 | 0.018 |
| 228 | 77941 | 0.341 | 0.013 | 0.336 | 0.041 | 1.155 | 0.266 | 0.574 | 0.149 |

Transgenic plants comprising recombinant DNA expressing protein as set forth in SEQ ID NO: 117, 140, 146, 177, or 193 showed enhanced salt stress tolerance by the second criterial as illustrated in Example 1L and 1M.

### E. Polyethylene Glycol (PEG) Induced Osmotic Stress Tolerance Screen

[0132] There are numerous factors, which can influence seed germination and subsequent seedling growth, one being the availability of water. Genes, which can directly affect the success rate of germination and early seedling growth, are potentially useful agronomic traits for improving the germination and growth of crop plants under drought stress. In this assay, PEG was used to induce osmotic stress on germinating transgenic lines of Arabidopsis thaliana seeds in order to screen for osmotically resistant seed lines.

[0133] T2 seeds were plated on BASTA selection plates containing 3% PEG and grown under standard light and temperature conditions. Seeds were plated on each plate containing 3% PEG, ½×MS salts, 1% phytagel, and 10 μg/ml glufosinate. Plates were placed at 4° C. for 3 days to stratify seeds. On day 11, plants were measured for primary root length. After 3 more days of growth, i.e., at day 14, plants were scored for transgenic status, primary root length, growth stage, visual color, and the seedlings were pooled for fresh weight measurement. A photograph of the whole plate was taken on day 14.

[0134] Seedling weight and root length were analyzed as quantitative responses according to example 1M. The final growth stage at day 14 was scored as success or failure based on whether the plants reached 3 rosette leaves and size of leaves are greater than 1 mm. The growth stage data was analyzed as a qualitative response according to example 1L. A list of recombinant DNA constructs that improve osmotic stress tolerance in transgenic plants illustrated in Table 7.

TABLE 7

| | | | | | | Growth | | Seedling | |
|---|---|---|---|---|---|---|---|---|---|
| | | Root length | | Root length | | stage at | | weight | |
| PEP | | at day 11 | | at day 14 | | day 14 | | at day 14 | |
| SEQ | Construct | Delta | | Delta | | Delta | P- | Delta | |
| ID | ID | mean | P-value | mean | P-value | mean | value | mean | P-value |
| 128 | 17524 | 0.468 | 0.016 | 0.441 | 0.026 | 4.000 | / | 0.845 | 0.004 |
| 135 | 18210 | 0.146 | 0.027 | 0.159 | 0.032 | −0.184 | 0.402 | −0.001 | 0.994 |
| 146 | 18315 | 0.275 | 0.025 | 0.207 | 0.005 | 1.235 | 0.468 | 0.744 | 0.058 |
| 152 | 19536 | 0.252 | 0.016 | 0.257 | 0.033 | 0.565 | 0.451 | 0.256 | 0.154 |
| 155 | 19614 | 0.271 | 0.028 | 0.138 | 0.237 | 4.000 | / | 0.325 | 0.043 |
| 171 | 19940 | 0.262 | 0.020 | 0.288 | 0.010 | 2.958 | 0.105 | 0.422 | 0.021 |
| 179 | 70938 | 0.303 | 0.099 | 0.256 | 0.258 | 4.000 | / | 0.593 | 0.038 |
| 168 | 70954 | 0.198 | 0.118 | 0.107 | 0.460 | 4.000 | / | 0.410 | 0.008 |
| 170 | 70960 | 0.332 | 0.019 | 0.350 | 0.064 | 4.000 | / | 0.399 | 0.009 |
| 174 | 70978 | 0.180 | 0.172 | 0.092 | 0.202 | 4.000 | / | 0.643 | 0.003 |
| 161 | 71306 | 0.284 | 0.104 | 0.150 | 0.277 | 4.000 | / | 0.646 | 0.041 |
| 192 | 72071 | 0.276 | 0.006 | 0.357 | 0.026 | 2.587 | 0.209 | −0.033 | 0.831 |
| 199 | 73493 | 0.129 | 0.171 | 0.142 | 0.014 | 1.802 | 0.291 | 0.221 | 0.002 |
| 139 | 75011 | 0.367 | 0.001 | 0.199 | 0.030 | 4.000 | / | 0.691 | 0.060 |
| 147 | 75080 | 0.162 | 0.001 | 0.107 | 0.014 | 1.396 | 0.068 | 0.347 | 0.013 |
| 206 | 75329 | 0.039 | 0.690 | 0.192 | 0.002 | 2.406 | 0.270 | 0.075 | 0.674 |
| 209 | 75430 | 0.105 | 0.134 | 0.294 | 0.038 | 1.284 | 0.485 | −0.160 | 0.075 |
| 153 | 76577 | 0.254 | 0.224 | 0.258 | 0.044 | 4.000 | / | 0.381 | 0.079 |
| 195 | 77605 | 0.340 | 0.150 | 0.445 | 0.095 | 2.635 | 0.061 | 0.685 | 0.036 |
| 120 | 78706 | 0.314 | 0.061 | 0.299 | 0.045 | 2.973 | 0.101 | 0.319 | 0.000 |

Transgenic plants comprising recombinant DNA expressing protein as set forth in SEQ ID NO: 118, 122, 126, 142, 173, 196, or 208 showed enhanced PEG osmotic stress tolerance by the second criterial as illustrated in Example 1L and 1M.

### F. Cold Shock Tolerance Screen

[0135] This example set forth a screen to identify Arabidopsis plants transformed with the genes of interest that are more tolerant to cold stress subjected during day 8 to day 28 after seed planting. During these crucial early stages, seedling growth and leaf area increase were measured to assess tolerance when Arabidopsis seedlings were exposed to low temperatures. Using this screen, genetic alterations can be found that enable plants to germinate and grow better than wild type plants under sudden exposure to low temperatures.

[0136] Eleven seedlings from T2 seeds of each transgenic line plus one control line were plated together on a plate containing ½×Gamborg Salts with 0.8 Phytagel™, 1% Phytagel, and 0.3% Sucrose. Plates were then oriented horizontally and stratified for three days at 4° C. At day three, plates were removed from stratification and exposed to standard conditions (16 hr photoperiod, 22° C. at day and 20° C. at night) until day 8. At day eight, plates were removed from standard conditions and exposed to cold shock conditions (24 hr photoperiod, 8° C. at both day and night) until the final day of the assay, i.e., day 28. Rosette areas were measured at day 8 and day 28, which were analyzed as quantitative responses according to example 1M. A list of recombinant nucleotides that improve cold shock stress tolerance in plants is illustrated in Table 8.

TABLE 8

| | | | | | Rosette area | | | |
|---|---|---|---|---|---|---|---|---|
| | | | Rosette area | | at day 28 | | Rosette area | |
| PEP | | | at day 8 | | Risk | | difference | |
| SEQ | Construct | | Delta | | score | | Delta | |
| ID | ID | Orientation | mean | P-value | mean | P-value | mean | P-value |
| 122 | 17520 | SENSE | 0.764 | 0.211 | 1.198 | 0.021 | 1.296 | 0.022 |
| 134 | 17913 | SENSE | 0.585 | 0.033 | 0.403 | 0.021 | 0.437 | 0.000 |
| 156 | 18204 | SENSE | 0.451 | 0.099 | 0.443 | 0.060 | 0.452 | 0.040 |
| 140 | 18507 | SENSE | 1.039 | 0.006 | 1.638 | 0.003 | 1.758 | 0.005 |
| 172 | 70921 | SENSE | 0.085 | 0.732 | 0.157 | 0.110 | 0.306 | 0.033 |
| 200 | 71228 | ANTI-SENSE | −0.254 | 0.340 | 0.677 | 0.002 | 1.033 | 0.002 |
| 195 | 77605 | SENSE | 0.019 | 0.949 | 1.008 | 0.027 | 1.017 | 0.027 |

Transgenic plants comprising recombinant DNA expressing protein as set forth in SEQ ID NO: 128, 130, or 137 showed enhanced cold stress tolerance by the second criterial as illustrated in Example 1L and 1M.

### G. Cold Germination Tolerance Screen

[0137] This example sets forth a screen to identify Arabidopsis plants transformed with the genes of interests are resistant to cold stress based on their rate of development, root growth and chlorophyll accumulation under low temperature conditions.

[0138] T2 seeds were plated and all seedlings used in the embodiments were grown at 8° C. Seeds were first surface disinfested using chlorine gas and then seeded on assay plates containing an aqueous solution of ½×Gamborg's B/5 Basal Salt Mixture (Sigma/Aldrich Corp., St. Louis, Mo., USA G/5788), 1% Phytagel™ (Sigma-Aldrich, P-8169), and 10 ug/ml glufosinate with the final pH adjusted to 5.8 using KOH. Test plates were held vertically for 28 days at a constant temperature of 8° C., a photoperiod of 16 hr, and average light intensity of approximately 100 umol/m²/s. At 28 days post plating, root length was measured, growth stage was observed, the visual color was assessed, and a whole plate photograph was taken.

[0139] The root length at day 28 was analyzed as a quantitative response according to example 1M. The growth stage at day 7 was analyzed as a qualitative response according to example 1L. A list of recombinant DNA constructs that improve cold stress tolerance in transgenic plants illustrated in Table 9.

TABLE 9

| | | | | Root length | | Growth stage | |
|---|---|---|---|---|---|---|---|
| | | | | at day 28 | | at day 28 | |
| PEP | Construct | Nomination | | Delta | | Delta | |
| SEQ ID | ID | ID | Orientation | mean | P-value | mean | P-value |
| 154 | 11113 | CGPG353 | ANTI-SENSE | 0.180 | 0.281 | 4.000 | 0.000 |
| 116 | 12155 | CGPG1135 | ANTI-SENSE | −0.110 | 0.202 | 4.000 | 0.000 |
| 125 | 17468 | CGPG2602 | SENSE | 0.251 | 0.075 | 4.000 | 0.000 |
| 144 | 18411 | CGPG2996 | SENSE | −0.016 | 0.839 | 4.000 | 0.000 |
| 133 | 18453 | CGPG2759 | SENSE | 0.177 | 0.247 | 4.000 | 0.000 |
| 142 | 18540 | CGPG2967 | SENSE | −0.096 | 0.749 | 4.000 | 0.000 |
| 143 | 19653 | CGPG2983 | SENSE | −0.024 | 0.911 | 4.000 | 0.000 |
| 169 | 19742 | CGPG3977 | SENSE | 0.135 | 0.292 | 4.000 | 0.000 |
| 163 | 70453 | CGPG3799 | SENSE | 0.039 | 0.660 | 4.000 | 0.000 |
| 172 | 70921 | CGPG4068 | SENSE | 0.125 | 0.029 | 4.000 | 0.000 |
| 179 | 70938 | CGPG4193 | SENSE | 0.008 | 0.955 | 4.000 | 0.000 |
| 177 | 70993 | CGPG4167 | SENSE | 0.183 | 0.027 | 4.000 | 0.000 |
| 164 | 71311 | CGPG3822 | SENSE | 0.531 | 0.008 | 4.000 | 0.000 |
| 191 | 72046 | CGPG5284 | SENSE | 0.055 | 0.721 | 4.000 | 0.000 |
| 123 | 72672 | CGPG2591 | SENSE | 0.443 | 0.101 | 4.000 | 0.000 |
| 130 | 72977 | CGPG2710 | SENSE | −0.315 | 0.347 | 4.000 | 0.000 |
| 157 | 73614 | CGPG3751 | SENSE | 0.939 | 0.009 | 4.000 | 0.000 |
| 201 | 74889 | CGPG7334 | SENSE | −0.144 | 0.648 | 4.000 | 0.000 |
| 203 | 74891 | CGPG7350 | SENSE | −0.042 | 0.860 | 4.000 | 0.000 |
| 210 | 75467 | CGPG7615 | SENSE | 0.167 | 0.308 | 4.000 | 0.000 |
| 227 | 77371 | CGPG8175 | SENSE | 0.092 | 0.530 | 4.000 | 0.000 |

Transgenic plants comprising recombinant DNA expressing protein as set forth in SEQ ID NO: 128, 130, or 137 showed enhanced cold stress tolerance by the second criterial as illustrated in Example 1L and 1M.

### H. Shade Tolerance Screen

[0140] Plants undergo a characteristic morphological response in shade that includes the elongation of the petiole, a change in the leaf angle, and a reduction in chlorophyll content. While these changes can confer a competitive advantage to individuals, in a monoculture the shade avoidance response is thought to reduce the overall biomass of the population. Thus, genetic alterations that prevent the shade avoidance response can be associated with higher yields. Genes that favor growth under low light conditions can also promote yield, as inadequate light levels frequently limit yield. This protocol describes a screen to look for Arabidopsis plants that show an attenuated shade avoidance response and/or grow better than control plants under low light intensity. Of particular interest, we were looking for plants that didn't extend their petiole length, had an increase in seedling weight relative to the reference and had leaves that were more close to parallel with the plate surface.

[0141] T2 seeds were plated on glufosinate selection plates with ½ MS medium. Seeds were sown on ½×MS salts, 1% Phytagel, 10 ug/ml BASTA. Plants were grown on vertical plates at a temperature of 22° C. at day, 20° C. at night and under low light (approximately 30 uE/m²/s, far/red ratio (655/665/725/735) ˜0.35 using PLAQ lights with GAM color filter #680). Twenty-three days after seedlings were sown, measurements were recorded including seedling status, number of rosette leaves, status of flower bud, petiole leaf angle, petiole length, and pooled fresh weights. A digital image of the whole plate was taken on the measurement day. Seedling weight and petiole length were analyzed as quantitative responses according to example 1M. The number of rosette leaves, flowering bud formation and leaf angel were analyzed as qualitative responses according to example 1L.

[0142] A list of recombinant DNA constructs that improve shade tolerance in plants illustrated in Table 10.

TABLE 10

| | | | | Seedling weight | | Petiole length | |
|---|---|---|---|---|---|---|---|
| | | | | at day 23 | | at day 23 | |
| PEP | Construct | Nomination | | Delta | | Delta | |
| SEQ ID | ID | ID | Orientation | mean | P-value | mean | P-value |
| 160 | 70458 | CGPG3757 | SENSE | −0.379 | 0.068 | −0.295 | 0.091 |
| 185 | 70769 | CGPG4622 | SENSE | −0.447 | 0.155 | −0.350 | 0.074 |
| 186 | 71643 | CGPG4700 | SENSE | 0.010 | 0.950 | −0.202 | 0.047 |
| 127 | 72018 | CGPG2651 | SENSE | −0.715 | 0.047 | −0.628 | 0.065 |
| 190 | 72034 | CGPG5283 | SENSE | −0.709 | 0.065 | −1.001 | 0.042 |
| 129 | 72078 | CGPG2708 | SENSE | −1.404 | 0.006 | −1.055 | 0.045 |
| 194 | 72108 | CGPG5322 | SENSE | −0.327 | 0.059 | −0.278 | 0.083 |
| 197 | 73032 | CGPG5806 | SENSE | −1.540 | 0.013 | −1.286 | 0.010 |
| 181 | 73216 | CGPG4528 | SENSE | −0.723 | 0.016 | −0.476 | 0.041 |
| 183 | 74227 | CGPG4560 | SENSE | −0.961 | 0.004 | −0.725 | 0.063 |
| 205 | 75340 | CGPG7493 | SENSE | −1.326 | 0.061 | −1.053 | 0.075 |
| 209 | 75430 | CGPG7604 | SENSE | −0.643 | 0.086 | −0.372 | 0.092 |
| 208 | 75477 | CGPG7600 | SENSE | −0.813 | 0.040 | −0.986 | 0.034 |
| 220 | 75581 | CGPG7734 | SENSE | −0.679 | 0.018 | −0.616 | 0.070 |
| 222 | 75658 | CGPG7836 | SENSE | −0.787 | 0.003 | −0.544 | 0.034 |
| 223 | 75738 | CGPG7867 | SENSE | −0.269 | 0.511 | −0.436 | 0.038 |
| 224 | 77356 | CGPG8105 | SENSE | −1.669 | 0.003 | −2.412 | 0.055 |
| 215 | 77822 | CGPG7691 | SENSE | −0.738 | 0.112 | −0.860 | 0.027 |
| 180 | 78653 | CGPG4210 | SENSE | −0.578 | 0.021 | −0.702 | 0.068 |
| 132 | 78979 | CGPG2736 | SENSE | −1.116 | 0.023 | −0.736 | 0.069 |

[0143] For “seeding weight”, if p<0.05 and delta or risk score mean>0, the transgenic plants showed statistically significant trait enhancement as compared to the reference. If p<0.2 and delta or risk score mean>0, the transgenic plants showed a trend of trait enhancement as compared to the reference with p<0.2.

[0144] For “petiole length”, if p<0.05 and delta<0, the transgenic plants showed statistically significant trait enhancement as compared to the reference. If p<0.2 and delta<0, the transgenic plants showed a trend of trait enhancement as compared to the reference.

[0145] Transgenic plants comprising recombinant DNA expressing protein as set forth in SEQ ID NO: 128, 184, or 195 showed enhanced tolerance to shade or low light condition by the second criterial as illustrated in Example 1L and 1M.

### I. Early Plant Growth and Development Screen

[0146] This example sets forth a plate based phenotypic analysis platform for the rapid detection of phenotypes that are evident during the first two weeks of growth. In this screen, we were looking for genes that confer advantages in the processes of germination, seedling vigor, root growth and root morphology under non-stressed growth conditions to plants. The transgenic plants with advantages in seedling growth and development were determined by the seedling weight and root length at day 14 after seed planting.

[0147] T2 seeds were plated on glufosinate selection plates and grown under standard conditions (˜100 uE/m²/s, 16 h photoperiod, 22° C. at day, 20° C. at night). Seeds were stratified for 3 days at 4° C. Seedlings were grown vertically (at a temperature of 22° C. at day 20° C. at night). Observations were taken on day 10 and day 14. Both seedling weight and root length at day 14 were analyzed as quantitative responses according to example 1M.

[0148] A list recombinant DNA constructs that improve early plant growth and development illustrated in Table 11.

TABLE 11

| | | | | Root length | | Root length | | Seedling weight | |
|---|---|---|---|---|---|---|---|---|---|
| PEP | | | | at day 10 | | at day 14 | | at day 14 | |
| SEQ | Construct | Nomination | | Delta | | Delta | | Delta | |
| ID | ID | ID | Orientation | mean | P-value | mean | P-value | mean | P-value |
| 151 | 18434 | CGPG3454 | SENSE | 0.188 | 0.069 | 0.031 | 0.585 | 0.040 | 0.714 |
| 133 | 18453 | CGPG2759 | SENSE | 0.199 | 0.149 | 0.222 | 0.070 | 0.061 | 0.605 |
| 178 | 19762 | CGPG4176 | SENSE | 0.226 | 0.009 | 0.133 | 0.031 | 0.045 | 0.835 |
| 173 | 70953 | CGPG4105 | SENSE | 0.347 | 0.032 | 0.309 | 0.052 | 0.275 | 0.273 |
| 126 | 75090 | CGPG2642 | SENSE | 0.316 | 0.020 | 0.146 | 0.095 | 0.459 | 0.073 |
| 211 | 75457 | CGPG7630 | SENSE | / | / | / | / | 0.373 | 0.019 |
| 213 | 75470 | CGPG7639 | SENSE | 0.186 | 0.069 | 0.128 | 0.058 | 0.318 | 0.039 |
| 216 | 75505 | CGPG7696 | SENSE | 0.135 | 0.018 | 0.051 | 0.567 | 0.079 | 0.564 |
| 165 | 76533 | CGPG3890 | SENSE | 0.225 | 0.075 | 0.135 | 0.112 | −0.119 | 0.531 |

[0149] Transgenic plants comprising recombinant DNA expressing a protein as set forth in SEQ ID NO: 122, 142, 179, 191 or 195 showed improved early plant growth and development by the second criterial as illustrated in Example 1L and 1M.

### J. Late Plant Growth and Development Screen

[0150] This example sets forth a soil based phenotypic platform to identify genes that confer advantages in the processes of leaf development, flowering production and seed maturity to plants.

[0151] Arabidopsis plants were grown on a commercial potting mixture (Metro Mix 360, Scotts Co., Marysville, Ohio) consisting of 30-40% medium grade horticultural vermiculite, 35-55% sphagnum peat moss, 10-20% processed bark ash, 1-15% pine bark and a starter nutrient charge. Soil was supplemented with Osmocote time-release fertilizer at a rate of 30 mg/ft³. T2 seeds were imbibed in 1% agarose solution for 3 days at 4° C. and then sown at a density of ˜5 per 2½″ pot. Thirty-two pots were ordered in a 4 by 8 grid in standard greenhouse flat. Plants were grown in environmentally controlled rooms under a 16 h day length with an average light intensity of ˜200 μmoles/m²/s. Day and night temperature set points were 22° C. and 20° C., respectively. Humidity was maintained at 65%. Plants were watered by sub-irrigation every two days on average until mid-flowering, at which point the plants were watered daily until flowering was complete.

[0152] Application of the herbicide glufosinate was performed to select T2 individuals containing the target transgene. A single application of glufosinate was applied when the first true leaves were visible. Each pot was thinned to leave a single glufosinate-resistant seedling ˜3 days after the selection was applied.

[0153] The rosette radius was measured at day 25. The silique length was measured at day 40. The plant parts were harvested at day 49 for dry weight measurements if flowering production was stopped. Otherwise, the dry weights of rosette and silique were carried out at day 53. The seeds were harvested at day 58. All measurements were analyzed as quantitative responses according to example 1M.

[0154] A list of recombinant DNA constructs that improve late plant growth and development illustrated in Table 12.

TABLE 12

| | | Rosette | | | | Seed | | Silique | | | |
|---|---|---|---|---|---|---|---|---|---|---|---|
| | | dry | | Rosette | | net dry | | dry | | Silique | |
| | | weight at | | radius | | weight | | weight | | length | |
| PEP | | day 53 | | at day 25 | | at day 62 | | at day 53 | | at day 40 | |
| SEQ | Construct | Delta | P- | Delta | P- | Delta | P- | Delta | P- | Delta | P- |
| ID | ID | mean | value | mean | value | mean | value | mean | value | mean | value |
| 121 | 72666 | 0.194 | 0.032 | / | / | 0.111 | 0.267 | 0.073 | 0.524 | −0.104 | 0.078 |
| 150 | 18433 | −0.363 | 0.222 | 0.169 | 0.006 | 0.357 | 0.017 | / | / | 0.099 | 0.011 |
| 166 | 70955 | −0.137 | 0.052 | 0.298 | 0.003 | 0.951 | 0.022 | 0.163 | 0.096 | −0.001 | 0.930 |
| 161 | 71306 | −0.058 | 0.556 | 0.043 | 0.352 | 1.522 | 0.009 | 0.120 | 0.011 | 0.031 | 0.766 |
| 211 | 75457 | −0.147 | 0.153 | 0.294 | 0.055 | 1.099 | 0.014 | 0.496 | 0.060 | −0.217 | 0.052 |
| 212 | 75469 | 0.305 | 0.075 | 0.267 | 0.020 | 1.447 | 0.015 | 0.322 | 0.038 | −0.105 | 0.205 |
| 218 | 75542 | 1.026 | 0.018 | 0.152 | 0.406 | −0.166 | 0.465 | / | / | −0.265 | 0.174 |
| 223 | 75738 | −0.654 | 0.102 | 0.064 | 0.363 | 0.774 | 0.000 | 0.293 | 0.170 | −0.095 | 0.093 |

### K. Limited Nitrogen Tolerance Screen

[0155] Under low nitrogen conditions, Arabidopsis seedlings become chlorotic and have less biomass. This example sets forth the limited nitrogen tolerance screen to identify Arabidopsis plants transformed with the gene of interest that are altered in their ability to accumulate biomass and/or retain chlorophyll under low nitrogen condition.

[0156] T2 seeds were plated on glufosinate selection plates containing 0.5× N-Free Hoagland's T 0.1 mM NH₄NO₃ T 0.1% sucrose T 1% phytagel media and grown under standard light and temperature conditions. At 12 days of growth, plants were scored for seedling status (i.e., viable or non-viable) and root length. After 21 days of growth, plants were scored for BASTA resistance, visual color, seedling weight, number of green leaves, number of rosette leaves, root length and formation of flowering buds. A photograph of each plant was also taken at this time point.

[0157] The seedling weight and root length were analyzed as quantitative responses according to example 1M. The number green leaves, the number of rosette leaves and the flowerbud formation were analyzed as qualitative responses according to example 1L. The leaf color raw data were collected on each plant as the percentages of five color elements (Green, DarkGreen, LightGreen, RedPurple, YellowChlorotic) using a computer imaging system. A statistical logistic regression model was developed to predict an overall value based on five colors for each plant.

[0158] A list of recombinant DNA constructs that improve low nitrogen availability tolerance in plants illustrated in Table 13.

TABLE 13

| | | | | | Leaf color | | | |
|---|---|---|---|---|---|---|---|---|
| | | | Root length | | at day 21 | | Rosette weight | |
| PEP | | | at day 21 | | Risk | | at day 21 | |
| SEQ | Construct | | Delta | | score | | Delta | |
| ID | ID | Orientation | mean | P-value | mean | P-value | mean | P-value |
| 115 | 10177 | ANTI-SENSE | −0.556 | 0.008 | 3.633 | 0.013 | 0.199 | 0.056 |
| 198 | 11157 | SENSE | −0.072 | 0.607 | 0.928 | 0.617 | 0.139 | 0.051 |
| 118 | 11873 | ANTI-SENSE | −0.327 | 0.037 | 3.065 | 0.018 | −0.013 | 0.822 |
| 117 | 12233 | SENSE | / | / | 2.183 | 0.087 | 0.066 | 0.243 |
| 188 | 12325 | ANTI-SENSE | −0.366 | 0.100 | 1.462 | 0.027 | −0.037 | 0.588 |
| 131 | 17445 | SENSE | / | / | 5.181 | 0.061 | −0.175 | 0.208 |
| 149 | 18431 | SENSE | −0.466 | 0.023 | 3.868 | 0.059 | −0.021 | 0.433 |
| 184 | 70678 | SENSE | −0.084 | 0.375 | 1.052 | 0.035 | 0.161 | 0.037 |
| 182 | 71139 | SENSE | −0.218 | 0.169 | −3.163 | 0.020 | 0.490 | 0.018 |
| 186 | 71643 | SENSE | 0.028 | 0.495 | −2.371 | 0.050 | 0.267 | 0.046 |
| 193 | 72116 | SENSE | −0.322 | 0.074 | −0.666 | 0.093 | 0.491 | 0.023 |
| 202 | 74854 | SENSE | / | / | 2.673 | 0.015 | −0.051 | 0.527 |
| 203 | 74891 | SENSE | −0.403 | 0.033 | 1.721 | 0.022 | 0.074 | 0.252 |
| 204 | 75314 | SENSE | −0.467 | 0.219 | 1.983 | 0.023 | −0.160 | 0.117 |
| 209 | 75430 | SENSE | −0.429 | 0.047 | 5.351 | 0.011 | −0.097 | 0.352 |
| 207 | 75453 | SENSE | 0.063 | 0.684 | −1.743 | 0.341 | 0.189 | 0.031 |
| 221 | 75524 | SENSE | −0.071 | 0.343 | 1.084 | 0.049 | −0.089 | 0.113 |
| 218 | 75542 | SENSE | −1.768 | 0.067 | 3.388 | 0.029 | −0.617 | 0.132 |
| 217 | 75589 | SENSE | −0.079 | 0.443 | 1.552 | 0.008 | 0.011 | 0.929 |
| 226 | 77363 | SENSE | / | / | 3.460 | 0.065 | −0.212 | 0.086 |
| 180 | 78653 | SENSE | 0.277 | 0.214 | 2.659 | 0.132 | 0.203 | 0.006 |
| 136 | 78710 | SENSE | / | / | 3.948 | 0.007 | 0.008 | 0.935 |
| 124 | 78977 | SENSE | / | / | 4.985 | 0.015 | 0.137 | 0.118 |
| 132 | 78979 | SENSE | −0.689 | 0.220 | 4.517 | 0.013 | −0.617 | 0.002 |

For rosette weight, if p<0.05 and delta or risk score mean>0, the transgenic plants showed statistically significant trait enhancement as compared to the reference. If p<0.2 and delta or risk score mean>0, the transgenic plants showed a trend of trait enhancement as compared to the reference with p<0.2. For root length, if p<0.05, the transgenic plants showed statistically significant trait enhancement as compared to the reference. If p<0.2, the transgenic plants showed a trend of trait enhancement as compared to the reference.

### L. Statistic Analysis for Qualitative Responses

[0159] A list of responses that were analyzed as qualitative responses illustrated in Table 14.

TABLE 14

| response | Screen | categories (success vs. failure) |
|---|---|---|
| Wilting response Risk | Soil drought tolerance screen | non-wilted vs. wilted |
| Score | | |
| growth stage at day 14 | heat stress tolerance screen | 50% of plants reach stage 1.03 vs. |
| | | not |
| growth stage at day 14 | salt stress tolerance screen | 50% of plants reach stage 1.03 vs. |
| | | not |
| growth stage at day 14 | PEG induced osmotic stress tolerance | 50% of plants reach stage 1.03 vs. |
| | screen | not |
| growth stage at day 7 | cold germination tolerance screen | 50% of plants reach stage 0.5 vs. not |
| number of rosette leaves | Shade tolerance screen | 5 leaves appeared vs. not |
| at day 23 | | |
| Flower bud formation at | Shade tolerance screen | flower buds appear vs. not |
| day 23 | | |
| leaf angle at day 23 | Shade tolerance screen | >60 degree vs. <60 degree |
| number of green leaves at | limited nitrogen tolerance screen | 6 or 7 leaves appeared vs. not |
| day 21 | | |
| number of rosette leaves | limited nitrogen tolerance screen | 6 or 7 leaves appeared vs. not |
| at day 21 | | |
| Flower bud formation at | limited nitrogen tolerance screen | flower buds appear vs. not |
| day 21 | | |

[0160] Plants were grouped into transgenic and reference groups and were scored as success or failure according to Table 14. First, the risk (R) was calculated, which is the proportion of plants that were scored as of failure plants within the group. Then the relative risk (RR) was calculated as the ratio of R (transgenic) to R (reference). Risk score (RS) was calculated as −log₂^{RR}. Two criteria were used to determine a transgenic with enhanced trait(s). Transgenic plants comprising recombinant DNA disclosed herein showed trait enhancement according to either or both of the two criteria.

[0161] For the first criteria, the risk scores from multiple events of the transgene of interest were evaluated for statistical significance by t-test using SAS statistical software (SAS 9, SAS/STAT User's Guide, SAS Institute Inc., Cary, N.C., USA). RS with a value greater than 0 indicates that the transgenic plants perform better than the reference. RS with a value less than 0 indicates that the transgenic plants perform worse than the reference. The RS with a value equal to 0 indicates that the performance of the transgenic plants and the reference don't show any difference. If p<0.05 and risk score mean>0, the transgenic plants showed statistically significant trait enhancement as compared to the reference. If p<0.2 and risk score mean>0, the transgenic plants showed a trend of trait enhancement as compared to the reference.

[0162] For the second criteria, the RS from each event was evaluated for statistical significance by t-test using SAS statistical software (SAS 9, SAS/STAT User's Guide, SAS Institute Inc, Cary, N.C., USA). The RS with a value greater than 0 indicates that the transgenic plants from this event performs better than the reference. The RS with a value less than 0 indicates that the transgenic plants from this event perform worse than the reference. The RS with a value equal to 0 indicates that the performance of the transgenic plants from this event and the reference don't show any difference. If p<0.05 and risk score mean>0, the transgenic plants from this event showed statistically significant trait enhancement as compared to the reference. If p<0.2 and risk score mean>0, the transgenic plants showed a trend of trait enhancement as compared to the reference. If two or more events of the transgene of interest showed improvement in the same response, the transgene was deemed to show trait enhancement.

### M. Statistic Analysis for Quantitative Responses

[0163] A list of responses that were analyzed as quantitative responses illustrated in Table 15.

TABLE 15

| response | screen |
|---|---|
| seed yield | Soil drought stress tolerance screen |
| seedling weight at day 14 | heat stress tolerance screen |
| root length at day 14 | heat stress tolerance screen |
| seedling weight at day 14 | salt stress tolerance screen |
| root length at day 14 | salt stress tolerance screen |
| root length at day 11 | salt stress tolerance screen |
| seedling weight at day 14 | PEG induced osmotic stress tolerance screen |
| root length at day 11 | PEG induced osmotic stress tolerance screen |
| root length at day 14 | PEG induced osmotic stress tolerance screen |
| rosette area at day 8 | cold shock tolerance screen |
| rosette area at day 28 | cold shock tolerance screen |
| difference in rosette area from day 8 to day 28 | cold shock tolerance screen |
| root length at day 28 | cold germination tolerance screen |
| seedling weight at day 23 | Shade tolerance screen |
| petiole length at day 23 | Shade tolerance screen |
| root length at day 14 | Early plant growth and development screen |
| Seedling weight at day 14 | Early plant growth and development screen |
| Rosette dry weight at day 53 | Late plant growth and development screen |
| rosette radius at day 25 | Late plant growth and development screen |
| seed dry weight at day 58 | Late plant growth and development screen |
| silique dry weight at day 53 | Late plant growth and development screen |
| silique length at day 40 | Late plant growth and development screen |
| Seedling weight at day 21 | Limited nitrogen tolerance screen |
| Root length at day 21 | Limited nitrogen tolerance screen |

The measurements (M) of each plant were transformed by log₂ calculation. The Delta was calculated as log₂M(transgenic)−log₂M(reference). Two criteria were used to determine trait enhancement. A transgene of interest could show trait enhancement according to either or both of the two criteria. The measurements (M) of each plant were transformed by log₂ calculation. The Delta was calculated as log₂M(transgenic)−log₂M(reference). If the measured response was Petiole Length for the Low Light assay, Delta was subsequently multiplied by −1, to account for the fact that a shorter petiole length is considered an indication of trait enhancement.

[0164] For the first criteria, the Deltas from multiple events of the transgene of interest were evaluated for statistical significance by t-test using SAS statistical software (SAS 9, SAS/STAT User's Guide, SAS Institute Inc, Cary, N.C., USA). Delta with a value greater than 0 indicates that the transgenic plants perform better than the reference. Delta with a value less than 0 indicates that the transgenic plants perform worse than the reference. The Delta with a value equal to 0 indicates that the performance of the transgenic plants and the reference don't show any difference. If p<0.05 and risk score mean>0, the transgenic plants showed statistically significant trait enhancement as compared to the reference. If p<0.2 and risk score mean>0, the transgenic plants showed a trend of trait enhancement as compared to the reference.

[0165] For the second criteria, the delta from each event was evaluated for statistical significance by t-test using SAS statistical software (SAS 9, SAS/STAT User's Guide, SAS Institute Inc., Cary, N.C., USA). The Delta with a value greater than 0 indicates that the transgenic plants from this event performs better than the reference. The Delta with a value less than 0 indicates that the transgenic plants from this event perform worse than the reference. The Delta with a value equal to 0 indicates that the performance of the transgenic plants from this event and the reference don't show any difference. If p<0.05 and delta mean>0, the transgenic plants from this event showed statistically significant trait improvement as compared to the reference. If p<0.2 and delta mean>0, the transgenic plants showed a trend of trait enhancement as compared to the reference. If two or more events of the transgene of interest showed enhancement in the same response, the transgene was deemed to show trait improvement.

### Example 2

### Identification of Homologs

[0166] A BLAST searchable “All Protein Database” is constructed of known protein sequences using a proprietary sequence database and the National Center for Biotechnology Information (NCBI) non-redundant amino acid database (nr.aa). For each organism from which a DNA sequence provided herein was obtained, an “Organism Protein Database” is constructed of known protein sequences of the organism; the Organism Protein Database is a subset of the All Protein Database based on the NCBI taxonomy ID for the organism.

[0167] The All Protein Database is queried using amino acid sequence of cognate protein for gene DNA used in trait-improving recombinant DNA, i.e., sequences of SEQ ID NO: 115 through SEQ ID NO: 228 using “blastp” with E-value cutoff of 1e-8. Up to 1000 top hits were kept, and separated by organism names. For each organism other than that of the query sequence, a list is kept for hits from the query organism itself with a more significant E-value than the best hit of the organism. The list contains likely duplicated genes, and is referred to as the Core List. Another list was kept for all the hits from each organism, sorted by E-value, and referred to as the Hit List.

[0168] The Organism Protein Database is queried using amino acid sequences of SEQ ID NO: 115 through SEQ ID NO: 228 using “blastp” with E-value cutoff of 1e-4. Up to 1000 top hits are kept. A BLAST searchable database is constructed based on these hits, and is referred to as “SubDB”. SubDB was queried with each sequence in the Hit List using “blastp” with E-value cutoff of 1e-8. The hit with the best E-value is compared with the Core List from the corresponding organism. The hit is deemed a likely ortholog if it belongs to the Core List, otherwise it is deemed not a likely ortholog and there is no further search of sequences in the Hit List for the same organism. Likely orthologs from a large number of distinct organisms were identified and are reported by amino acid sequences of SEQ ID NO: 229 to SEQ ID NO: 4815. These orthologs are reported in Tables 16 as homologs to the proteins cognate to genes used in trait-improving recombinant DNA.

TABLE 16

| | | | | | | | | | | | | |
|---|---|---|---|---|---|---|---|---|---|---|---|---|
| 115: | 1365 | 1361 | 2178 | 2823 | 2234 | 2825 | 1854 | 245 | 1518 | 2928 | 3573 | 2922 |
| | 955 | 1930 | 1915 | 2795 | 467 | 3944 | 3288 | 4383 | 4338 | 3604 | 2927 | 345 |
| | 4267 | 4265 | 2723 | 3383 | 2779 | 4284 | 4571 | 2432 | 316 | 310 | 3031 | 2099 |
| | 725 | 762 | 442 | 2727 | 4758 | 3997 | 4738 | 2662 | 313 | 405 | 1748 | 3751 |
| | 4132 | 3483 | 1398 | 3343 | 2900 | 397 | 1254 | 2642 | 1508 | 4249 | 2573 | 4178 |
| | 4424 | 593 | 738 | 595 | 597 | 1798 | 552 | 923 | 2444 | 2389 | 2396 | 2740 |
| | 607 | 1462 | | | | | | | | | | |
| 116: | 4081 | 1259 | 3766 | 3192 | 503 | 1192 | 4791 | 698 | 1068 | 3223 | 785 | 4102 |
| 117: | 887 | 4054 | 4545 | 665 | 4519 | 3562 | 3980 | 3020 | 4522 | 1726 | 3155 | 657 |
| | 1358 | 4086 | 3966 | 2065 | 1005 | 2184 | 4022 | 1570 | 1032 | | | |
| 118: | 1513 | 2965 | 4541 | 3048 | 3971 | 3972 | 1774 | 477 | 4041 | 2003 | 3299 | 3663 |
| | 1445 | 2798 | 1168 | 4511 | 1889 | 4626 | 3152 | | | | | |
| 119: | 2925 | 2260 | 3866 | 4714 | 2527 | 3711 | 4566 | 2368 | 1960 | 3655 | 1894 | 2960 |
| | 4271 | 2098 | 2639 | 539 | 1297 | 4222 | 4224 | 2811 | 1914 | 516 | 3455 | 3807 |
| | 1505 | 832 | 1843 | 1740 | 4435 | 240 | 1919 | 4235 | 1867 | 3639 | 3240 | 1861 |
| | 2797 | 244 | 4414 | 4612 | 2951 | 732 | 1805 | 3571 | 3838 | 2038 | 3559 | 1002 |
| 120: | 2141 | 365 | 2225 | 1364 | 876 | 4283 | 2146 | 4286 | 1974 | 1127 | 3389 | 1465 |
| | 556 | 2801 | 4693 | 273 | 2062 | 360 | 1124 | 320 | 341 | 338 | 335 | 292 |
| | 289 | 285 | 283 | 3419 | 3557 | | | | | | | |
| 121: | 642 | 2784 | 2160 | 3289 | 2668 | 3254 | 4128 | 425 | 1248 | 2013 | 4371 | 4598 |
| | 2019 | 1144 | 820 | 1036 | 4619 | 3449 | | | | | | |
| 122: | 3177 | 4253 | 4257 | 2808 | 2789 | 2433 | 1394 | 1339 | 1333 | 1336 | 1335 | 4636 |
| | 2178 | 4187 | 811 | 243 | 2305 | 2708 | 2702 | 4614 | 2635 | 2640 | 2795 | 2927 |
| | 3411 | 3415 | 723 | 2829 | 2111 | 2103 | 2653 | 2628 | 2625 | 948 | 540 | 4131 |
| | 4147 | 4228 | 4244 | 4213 | 305 | 303 | 1255 | 323 | 2389 | 1784 | | |
| 123: | 3891 | 574 | 1849 | 1832 | 4018 | 3244 | 3777 | 3780 | 291 | 4618 | 994 | 965 |
| | 1028 | 961 | 943 | 939 | 1568 | 1122 | 1119 | 1095 | 1025 | 1010 | 1006 | 1044 |
| | 1077 | 1043 | 992 | 989 | 3121 | 356 | 354 | 1372 | 3106 | 993 | 390 | 3391 |
| | 4210 | 4252 | 1630 | 1813 | 3431 | 3636 | 3161 | 3585 | | | | |
| 124: | 2583 | 2651 | 3877 | 2863 | 4243 | 1233 | 2941 | 3494 | 2914 | 3154 | 4793 | 454 |
| | 3675 | 937 | 380 | 3067 | 4551 | 4057 | 1220 | 4251 | 4588 | 3970 | 4474 | 2864 |
| | 4032 | 2654 | 1455 | 3380 | 4351 | 2633 | 4809 | 2410 | 421 | 1007 | 2802 | 2387 |
| 125: | 2178 | 4315 | 811 | 815 | 2370 | 247 | 1178 | 1518 | 2331 | 2795 | 478 | 3089 |
| | 2222 | 2226 | 2247 | 2250 | 3604 | 2927 | 2966 | 3852 | 1626 | 4068 | 2332 | 1594 |
| | 4814 | 2369 | 2367 | 3140 | 2829 | 1586 | 4070 | 3113 | 899 | 921 | 2233 | 1065 |
| | 1613 | 2747 | 4527 | 2417 | 1667 | 1670 | 4249 | 624 | 745 | 2445 | 2929 | 2787 |
| | 923 | 2148 | 792 | 323 | 3071 | 2348 | 3810 | 2444 | 2389 | 2740 | 3404 | |
| 126: | 3322 | 1820 | 4486 | 4040 | 695 | 3253 | 3887 | 3307 | 3943 | 3835 | 3992 | 4014 |
| | 3362 | 2650 | 2706 | 3574 | 777 | 1407 | 1175 | 3850 | 4406 | 2270 | 4603 | 2885 |
| | 947 | 3776 | 827 | 1939 | 1058 | 545 | 466 | 4658 | 1812 | 2011 | 3736 | 2139 |
| | 3057 | 1551 | 1230 | 2469 | 1828 | 3750 | 1397 | 2563 | 1191 | 3441 | 1278 | 3531 |
| | 2403 | 420 | 2084 | 4164 | 2053 | 3599 | | | | | | |
| 127: | 2583 | 3877 | 4683 | 1233 | 4251 | 1220 | 4588 | 4474 | 3970 | 2864 | 4032 | 2654 |
| | 4351 | 3380 | 1455 | 4809 | 2633 | 2410 | 421 | 1007 | 4806 | 3818 | | |
| 128: | 401 | 2840 | 3369 | 2530 | 2805 | 4475 | 324 | 1347 | 2549 | 2063 | 3326 | 4676 |
| 129: | 4020 | 703 | 2462 | 2488 | 1797 | 991 | 4489 | 4582 | 1351 | 931 | 4647 | 2200 |
| | 3700 | 2532 | 4796 | 2240 | 2407 | 2104 | 952 | 1081 | 3165 | 3246 | | |
| 130: | 3424 | 2061 | 3913 | 259 | 3775 | 1236 | 4394 | 4028 | 543 | 603 | 1767 | 2980 |
| | 3687 | 998 | 359 | 2842 | 3462 | 1684 | 1180 | 1418 | 2905 | 450 | 3132 | 1803 |
| | 3360 | 638 | 3859 | 4066 | 1291 | 3917 | 1295 | 272 | | | | |
| 131: | 4813 | 1365 | 1361 | 2178 | 2823 | 4187 | 2234 | 2825 | 811 | 815 | 1518 | 2050 |
| | 2640 | 2635 | 4144 | 2795 | 1942 | 4572 | 675 | 2927 | 2597 | 1322 | 1234 | 4231 |
| | 723 | 3713 | 3696 | 1398 | 4228 | 1569 | 863 | 1819 | 1667 | 1670 | 4249 | 3968 |
| | 552 | 923 | 303 | 305 | 1255 | 323 | 2389 | 1784 | | | | |
| 132: | 1842 | 1379 | 3525 | 3342 | 1535 | 1533 | 3618 | 1860 | 3989 | 3123 | 1520 | 1716 |
| | 2867 | 271 | 2627 | 3010 | 3747 | 1534 | 1530 | 682 | 423 | 3752 | 3443 | 3358 |
| | 4732 | 559 | 4350 | 505 | 877 | 3282 | 4196 | 1022 | 3081 | 4767 | 1284 | |
| 133: | 1628 | 480 | 3341 | 4415 | 1152 | 3236 | 2385 | 1074 | 2303 | 3429 | 3551 | 1161 |
| | 778 | 3578 | 4174 | 4731 | 4744 | 1592 | 636 | 402 | 4378 | 3139 | 3540 | 1659 |
| | 557 | 3371 | 2026 | 3709 | 1938 | 3523 | 664 | 3066 | 2197 | 4012 | 2851 | 1660 |
| | 3612 | 4180 | 3416 | 3230 | 1866 | 981 | 542 | 997 | 1091 | 2000 | 653 | 4289 |
| | 2870 | 826 | 1066 | | | | | | | | | |
| 134: | 4574 | 4745 | 2712 | 3439 | 3136 | 509 | 1387 | 1391 | 1390 | 1926 | 1754 | 3261 |
| | 3328 | 1607 | 1587 | 1595 | 1610 | 3995 | 3461 | 3701 | 1837 | 3403 | 3085 | 3898 |
| | 4567 | 2451 | 3297 | 1821 | 2414 | 4434 | 3873 | 1779 | 2486 | 1328 | 1420 | 1246 |
| | 1231 | 673 | 2261 | 3259 | 4532 | 2878 | 2164 | 1084 | 3765 | 474 | 2742 | |
| 135: | 4253 | 4257 | 2807 | 2808 | 2789 | 1799 | 1333 | 4636 | 1365 | 1361 | 4187 | 2234 |
| | 2825 | 815 | 811 | 1405 | 4245 | 3243 | 1518 | 2995 | 1506 | 2635 | 2640 | 2331 |
| | 2795 | 3633 | 2264 | 4573 | 723 | 2912 | 2111 | 2103 | 2662 | 4228 | 1667 | 1670 |
| | 1798 | 552 | 923 | 1255 | 323 | 2389 | 1784 | 4637 | 1809 | | | |
| 136: | 1250 | 2536 | 4347 | 3202 | 4419 | 1790 | 2293 | 2961 | 379 | 2616 | 1516 | 3561 |
| | 1577 | 764 | | | | | | | | | | |
| 137: | 4402 | 3160 | 3677 | 451 | 4395 | 2546 | 1402 | 1338 | 2398 | 4540 | 4622 | 4060 |
| | 3919 | 3008 | 3598 | 2989 | 2115 | 1808 | 3327 | 4501 | 479 | 858 | 3055 | 3718 |
| | 4804 | 2602 | 4413 | 386 | 2399 | 3001 | 4632 | 4493 | 2560 | 2161 | 373 | 1323 |
| | 1421 | 3430 | 428 | 3211 | 1060 | 3305 | 3311 | 2952 | 3458 | 336 | 3946 | 525 |
| | 3036 | 643 | 822 | | | | | | | | | |
| 138: | 268 | 3009 | | | | | | | | | | |
| 139: | 3889 | 4745 | 3136 | 1391 | 1926 | 1754 | 3261 | 3328 | 1610 | 1587 | 2322 | 3995 |
| | 893 | 3461 | 3701 | 2564 | 3197 | 2534 | 4510 | 3848 | 445 | 249 | 1131 | 2345 |
| | 4567 | 2451 | 3034 | 1052 | 660 | 2613 | 4799 | 713 | 1309 | 1501 | 2067 | 3873 |
| | 2486 | 2366 | 4715 | 4400 | 1195 | 3653 | 3259 | 343 | 367 | 2164 | 4392 | 1084 |
| | 686 | 474 | 3765 | | | | | | | | | |
| 140: | 1678 | 1233 | 3185 | 4682 | 3067 | 4362 | 1752 | 964 | 4339 | 656 | 4053 | 2654 |
| | 1257 | 4535 | 1298 | 4418 | 4547 | 2425 | 3493 | 1035 | 1770 | 2802 | 2387 | 453 |
| | 2964 | | | | | | | | | | | |
| 141: | 2542 | 1517 | 1865 | 4374 | 1881 | 3845 | 1987 | 2224 | 4080 | 1600 | 557 | 1588 |
| | 1207 | 962 | 4365 | 4169 | 1318 | 542 | 2109 | 997 | 1091 | 2000 | 653 | 2458 |
| | 3459 | 4648 | 3746 | | | | | | | | | |
| 142: | 2649 | 3341 | 1196 | 1800 | 1600 | 2446 | 2397 | 1207 | 962 | 4365 | 4140 | 4695 |
| | 542 | 1091 | 997 | 3300 | 930 | 3962 | 1273 | | | | | |
| 143: | 1973 | 2178 | 2823 | 815 | 811 | 247 | 1178 | 1518 | 2428 | 1930 | 1915 | 2795 |
| | 3604 | 2927 | 1495 | 1776 | 552 | 923 | 323 | 2389 | 914 | 4158 | 3414 | |
| 144: | 1143 | 3272 | 3274 | 3315 | 1854 | 245 | 1518 | 4528 | 2795 | 4383 | 1299 | 1277 |
| | 4338 | 2927 | 4267 | 4265 | 345 | 2723 | 3383 | 4571 | 2432 | 4758 | 534 | 1748 |
| | 3751 | 4132 | 3483 | 2900 | 1254 | 397 | 3343 | 2642 | 1667 | 1670 | 4249 | 2573 |
| | 4178 | 4363 | 595 | 552 | 923 | 792 | 2444 | 2389 | 2396 | 759 | 2740 | 463 |
| 145: | 1293 | 1263 | 1214 | 3885 | 4490 | 2579 | 1932 | 4577 | 4334 | 714 | 3682 | 280 |
| | 1416 | 786 | 3595 | 2619 | 2461 | 2540 | 3260 | 4199 | 796 | 4202 | 4090 | 528 |
| | 912 | 435 | 3338 | 632 | 1900 | 537 | 2598 | 288 | 2447 | 4047 | 2716 | 1367 |
| | 501 | 2151 | 2720 | 1564 | 3507 | 4299 | | | | | | |
| 146: | 4508 | 2457 | 2498 | 4463 | 1198 | 1202 | 1522 | 4137 | 168 | 1686 | 3401 | 2996 |
| | 2776 | 3224 | 2656 | 1927 | 744 | 795 | 4726 | 3222 | 3183 | 1434 | 4447 | 4500 |
| | 2015 | 2854 | 2839 | 2836 | 2852 | 3789 | 4157 | 4737 | 741 | 4270 | 1024 | 2180 |
| | 710 | 4342 | 4779 | 3584 | 3976 | 3529 | 1898 | 1270 | 2947 | 3075 | 3276 | 4016 |
| | 2473 | 2163 | 262 | 4564 | 4134 | 2330 | | | | | | |
| 147: | 2494 | 1573 | 1553 | 1591 | 1589 | 4051 | 2323 | 3221 | 1699 | 1702 | 2525 | 4319 |
| | 4139 | 4141 | 3017 | 3016 | 1680 | 2994 | 251 | 1969 | 4478 | 2416 | 4634 | 3825 |
| | 2478 | 2419 | 3377 | 867 | 1697 | 1718 | 1715 | 1677 | 1675 | 2460 | 2372 | 1840 |
| | 3771 | 4733 | 1694 | 1690 | 1712 | 4201 | 3076 | 2637 | 2634 | 794 | 784 | 791 |
| | 813 | 2604 | 2360 | 2529 | 3124 | 1113 | 1989 | 2463 | 2479 | 4304 | 3465 | 2978 |
| | 3799 | 4550 | 974 | 2301 | 520 | 1643 | 1671 | 1646 | 3932 | 4538 | 644 | 1846 |
| | 1901 | 4613 | 2971 | 4808 | 4298 | 4359 | 1321 | 2289 | 1316 | 2953 | 3356 | 1783 |
| | 3252 | 3472 | 3107 | 1751 | 910 | 1743 | 4711 | 2352 | 3914 | 2485 | 4127 | 1730 |
| | 2219 | 242 | 586 | 3080 | 3102 | 2813 | 3602 | 2792 | 2483 | 2559 | 2553 | 302 |
| | 282 | 3109 | 1641 | 536 | 4264 | 3473 | 2576 | | | | | |
| 148: | 4792 | 1080 | 1818 | 2039 | 1864 | 557 | 997 | 1091 | 2000 | 653 | 3444 | |
| 149: | 401 | 2840 | 324 | 2005 | 1347 | 2549 | 1519 | 2063 | 4421 | 3326 | 1256 | |
| 150: | 3320 | 634 | 1294 | 378 | 2057 | 592 | 617 | 614 | 2862 | 3817 | 267 | 1357 |
| | 1355 | 1354 | 1314 | 4013 | 2134 | 408 | 1994 | 3091 | 3629 | 3111 | 3593 | 2313 |
| | 4497 | 1484 | 2048 | 381 | 3451 | 1289 | 2516 | 1514 | 2569 | 2195 | 1525 | 1531 |
| | 1509 | 1523 | 2070 | 2948 | 2519 | 4544 | 4296 | 3996 | 4606 | 2448 | 2688 | 321 |
| | 3694 | 589 | 3670 | 1481 | 3902 | 363 | 2110 | 4006 | 4007 | 4008 | 3509 | 1666 |
| | 3070 | 3028 | 4759 | 1982 | 279 | 1562 | 3770 | 1540 | 3874 | 524 | 2296 | 2241 |
| | 4368 | 2210 | 4259 | 2129 | 1090 | 3830 | 2832 | 1123 | 3518 | 909 | 3745 | 620 |
| | 4593 | 3520 | 4694 | 635 | 618 | 3695 | | | | | | |
| 151: | 4477 | 640 | 213 | 3024 | 4491 | 3762 | 1929 | 4645 | 2609 | 4215 | 4484 | 355 |
| | 3499 | 3114 | 1088 | 1076 | 3433 | 1688 | 3238 | 3505 | 4724 | 2381 | 1304 | 297 |
| | 4273 | 506 | 4689 | 1448 | | | | | | | | |
| 152: | 3320 | 3756 | 3758 | 3699 | 2028 | 375 | 2988 | 4729 | 1986 | 267 | 1357 | 1354 |
| | 1355 | 1314 | 3178 | 4592 | 4591 | 3091 | 4485 | 3582 | 3111 | 3591 | 4346 | 4673 |
| | 2731 | 580 | 598 | 2672 | 1377 | 2967 | 3398 | 4794 | 3902 | 1940 | 3797 | 3558 |
| | 4423 | 1982 | 3270 | 3309 | 3645 | 4593 | 2572 | 511 | 4694 | 4438 | 2079 | 747 |
| | 3040 | 3983 | 568 | 1411 | 2206 | 3644 | | | | | | |
| 153: | 1460 | 3242 | 4430 | 1829 | 4141 | 1680 | 3764 | 4293 | 3941 | 1546 | 3825 | 3834 |
| | 3175 | 1697 | 1677 | 1675 | 4468 | 4266 | 1712 | 1694 | 1690 | 2871 | 4004 | 4654 |
| | 1370 | 4669 | 1984 | 1193 | 1172 | 1194 | 3076 | 2223 | 1073 | 4333 | 797 | 813 |
| | 2360 | 3799 | 4550 | 2728 | 3975 | 2301 | 1671 | 1643 | 3669 | 1578 | 1901 | 1096 |
| | 2276 | 897 | 436 | 3755 | 1713 | 3283 | 3018 | 4135 | 3779 | 2803 | 266 | 500 |
| | 910 | 2252 | 1743 | 753 | 3163 | 3162 | 1730 | 2219 | 3256 | 4183 | 3367 | 2689 |
| | 2765 | 3623 | 3437 | 1641 | 3610 | 3144 | 1887 | 4264 | 3805 | 2853 | 872 | 1463 |
| 154: | 349 | 1453 | 4088 | 1176 | 2379 | 2142 | 1331 | 946 | 3969 | 4707 | 4552 | 1841 |
| | 4153 | 2942 | 3482 | 263 | 3605 | 4515 | 2643 | 2298 | 2299 | 2513 | 1219 | 1319 |
| | 951 | 326 | 1549 | 4025 | 1026 | 1027 | 2799 | 3271 | 715 | 1793 | 1637 | 1515 |
| | 2246 | 4279 | 562 | | | | | | | | | |
| 155: | 2709 | 4268 | 1083 | 3548 | 4112 | 1810 | | | | | | |
| 156: | 3424 | 3399 | 2865 | 4036 | 2073 | 543 | 4505 | 359 | 2842 | 3462 | 2905 | 459 |
| | 2719 | 4616 | 3541 | 3985 | 1629 | 2626 | 783 | 638 | 3859 | 707 | 4035 | 1184 |
| 157: | 988 | 236 | 255 | 301 | 346 | 3905 | 963 | 1004 | 4687 | 296 | 1009 | 904 |
| | 901 | 879 | 3928 | 3929 | 1162 | 3927 | 3912 | 1046 | 2600 | 959 | 889 | 885 |
| | 4401 | 384 | 3292 | 1759 | 3454 | 4328 | 295 | 3382 | 2452 | 766 | 1863 | 2760 |
| | 3524 | 3503 | 3485 | 3506 | 3836 | 3714 | 4611 | 332 | 3556 | 3484 | 3477 | 3481 |
| | 3339 | 3062 | 3456 | 4710 | 1086 | 583 | 2701 | 2647 | 2167 | 2165 | 2704 | 2149 |
| | 2699 | 3352 | 3319 | 3440 | 3393 | 3333 | 3301 | 3336 | 3904 | 3954 | 4001 | 3982 |
| | 3979 | 3665 | 3664 | 3861 | 3858 | 3955 | 3953 | 3865 | 3977 | 3907 | 3909 | 3876 |
| | 3787 | 3447 | 3547 | 3544 | 3539 | 3527 | 2025 | 625 | 697 | 1188 | 4076 | 3069 |
| | 2306 | 2307 | 388 | 2361 | 234 | 400 | 1681 | 1583 | 1547 | 376 | 4226 | 2237 |
| | 2034 | 3302 | 3662 | 2071 | 2856 | 1078 | 1789 | 1107 | 3445 | 3879 | 3950 | 3951 |
| | 3903 | 3882 | 3930 | 3931 | 3862 | 3864 | 3959 | 3981 | 3978 | 3875 | 4725 | 4716 |
| | 1883 | 1378 | 2119 | 1888 | 1873 | 1871 | 4646 | 1869 | 986 | 4713 | 1816 | |
| 158: | 3729 | 2266 | 2722 | 1410 | 680 | 2644 | 932 | 3974 | 2135 | 1703 | 2232 | 891 |
| | 2242 | 2238 | 2265 | 1647 | 2190 | 2269 | 903 | 1158 | 3310 | 1536 | 541 | 1615 |
| | 4256 | | | | | | | | | | | |
| 159: | 988 | 255 | 301 | 346 | 3905 | 963 | 1004 | 4687 | 1009 | 901 | 879 | 1162 |
| | 3927 | 1145 | 4145 | 1835 | 2320 | 2600 | 959 | 889 | 885 | 4401 | 384 | 2523 |
| | 4332 | 4335 | 3396 | 4318 | 1924 | 2517 | 3456 | 4710 | 1086 | 3577 | 2408 | 3858 |
| | 3861 | 3955 | 3907 | 3909 | 3876 | 3447 | 3547 | 3544 | 3539 | 3527 | 2431 | 388 |
| | 2418 | 1691 | 4473 | 3445 | 3879 | 3951 | 3950 | 3864 | 3862 | 3959 | 3981 | 3978 |
| | 3875 | 4716 | 4725 | 1883 | 986 | 4765 | | | | | | |
| 160: | 2166 | 3361 | 2042 | 4437 | 4450 | 4706 | 712 | 4777 | 4233 | 2089 | 1581 | |
| 161: | 988 | 236 | 255 | 301 | 963 | 1004 | 4687 | 296 | 1009 | 904 | 901 | 879 |
| | 3928 | 3929 | 3927 | 4145 | 1046 | 2600 | 959 | 889 | 885 | 4401 | 384 | 3357 |
| | 2201 | 2281 | 2949 | 717 | 261 | 4668 | 491 | 3267 | 4382 | 3456 | 4710 | 1086 |
| | 2408 | 3319 | 3333 | 3440 | 3393 | 3301 | 3352 | 3336 | 3954 | 3904 | 3447 | 3547 |
| | 3544 | 3539 | 3527 | 1744 | 4287 | 388 | 3516 | 3354 | 2386 | 3452 | 3683 | 1078 |
| | 1789 | 1107 | 3445 | 4716 | 4725 | 1883 | 1378 | 2119 | 986 | 1129 | | |
| 162: | 1387 | 2858 | 749 | 4717 | 3820 | 746 | 3837 | 857 | 3793 | 3657 | 2080 | 2414 |
| | 1821 | 4434 | 3855 | 294 | 2105 | 4059 | 886 | 1217 | 864 | 2037 | 4532 | 2742 |
| | 985 | 4772 | | | | | | | | | | |
| 163: | 760 | 4005 | 3088 | 2102 | 1435 | 2243 | 2847 | 2845 | 2587 | 1899 | 2262 | |
| 164: | 988 | 4352 | 236 | 255 | 301 | 346 | 3905 | 963 | 1004 | 4687 | 296 | 1009 |
| | 904 | 901 | 879 | 3928 | 3929 | 1162 | 3927 | 1046 | 845 | 959 | 889 | 885 |
| | 816 | 1075 | 4151 | 584 | 606 | 560 | 523 | 535 | 504 | 1653 | 3382 | 766 |
| | 1875 | 3323 | 3456 | 4710 | 1086 | 583 | 3319 | 3333 | 3393 | 3301 | 3954 | 3352 |
| | 3336 | 3440 | 3904 | 3861 | 3858 | 3955 | 3865 | 3977 | 3907 | 3909 | 3876 | 3787 |
| | 3447 | 3544 | 3547 | 3539 | 3527 | 4272 | 2306 | 2307 | 388 | 2361 | 977 | 1078 |
| | 1789 | 1107 | 3445 | 3879 | 3951 | 3950 | 3882 | 3903 | 3930 | 3931 | 3862 | 3864 |
| | 3959 | 3981 | 3978 | 3875 | 4716 | 4725 | 1883 | 1378 | 2119 | 986 | | |
| 165: | 1294 | 375 | 412 | 413 | 267 | 2562 | 4013 | 4485 | 3591 | 4673 | 4346 | 580 |
| | 598 | 4488 | 4575 | 1502 | 2198 | 2652 | 2849 | 1069 | 3058 | 3902 | 3753 | 1940 |
| | 3269 | 393 | 3509 | 3410 | 933 | 4087 | 1302 | 3774 | 1982 | 342 | 337 | 340 |
| | 319 | 4368 | 663 | 684 | 3015 | 2783 | 3168 | 4694 | 357 | 4456 | 484 | 2475 |
| | 1419 | 1807 | | | | | | | | | | |
| 166: | 1363 | 4115 | 2693 | 2690 | 443 | 375 | 971 | 2343 | 2346 | 2351 | 743 | 4013 |
| | 2056 | 2074 | 3318 | 690 | 3565 | 2547 | 553 | 4061 | 4063 | 2112 | 915 | 3781 |
| | 2371 | 2902 | 2945 | 2901 | 1903 | 2584 | 4308 | 3190 | 4559 | 4446 | 648 | 2499 |
| | 1921 | 1528 | 958 | 473 | 444 | 446 | 470 | 468 | 465 | 957 | 4010 | 841 |
| | 395 | 843 | 960 | 1396 | 3122 | 3724 | 2449 | 2876 | 3509 | 1967 | 253 | 4445 |
| | 4558 | 4368 | 3702 | 1951 | 1464 | 4674 | 4595 | 4118 | 2349 | 3520 | 619 | 3521 |
| | 2354 | 511 | 742 | 1735 | 4143 | 2100 | | | | | | |
| 167: | 1325 | 1725 | 2821 | 2903 | 494 | 1830 | 3501 | 4690 | 2152 | 4635 | 3703 | 2500 |
| | 3304 | 438 | 1496 | 4381 | 4667 | 4579 | 4389 | 4397 | 4312 | 419 | 2255 | 4514 |
| | 4741 | 2899 | 3988 | 441 | 945 | 1395 | 2714 | 2749 | 2024 | 873 | 668 | 1912 |
| | 3078 | 4386 | 4323 | 3918 | 2001 | 3748 | 3600 | 3737 | 1768 | 2745 | 3316 | 1417 |
| | 1868 | 2707 | 4030 | 3790 | 649 | 772 | | | | | | |
| 168: | 3730 | 4508 | 2457 | 2498 | 1438 | 718 | 3743 | 2857 | 146 | 2330 | 4163 | 582 |
| | 4354 | 2209 | 1950 | 629 | 3475 | 2049 | 3027 | 4463 | 2501 | 1997 | 3530 | 3234 |
| | 2017 | 1198 | 1202 | 1927 | 4726 | 795 | 3298 | 748 | 3222 | 978 | 3576 | 4789 |
| | 1456 | 2412 | 1253 | 3183 | 1434 | 4447 | 2015 | 2854 | 3789 | 4157 | 4737 | 790 |
| | 3754 | 1719 | 1216 | 1627 | 1111 | 1024 | 741 | 2180 | 4270 | 3584 | 710 | 4779 |
| | 4342 | 3976 | 3529 | 1898 | 3075 | 1270 | 2947 | 3276 | 262 | 2217 | 4016 | 2163 |
| | 4564 | 2473 | 4134 | 4137 | 1522 | | | | | | | |
| 169: | 2963 | 1567 | 3731 | 2383 | 572 | 1266 | 3698 | 3280 | 2318 | 4454 | 563 | 1308 |
| | 4633 | 1714 | 1920 | 1011 | 2696 | 1524 | 4678 | 2411 | 3783 | 1910 | 271 | 3010 |
| | 1045 | 836 | 4666 | 4186 | 1432 | 2130 | 3317 | 3872 | 3432 | 682 | 2183 | 3822 |
| | 4409 | 812 | 4301 | 433 | 3634 | 1454 | | | | | | |
| 170: | 3688 | 3255 | 3188 | 3167 | 3073 | 3072 | 3690 | 3235 | 3150 | 3097 | 3094 | 3092 |
| | 3090 | 3715 | 3200 | 2168 | 2032 | 3594 | 1527 | 3174 | 2325 | 1372 | 993 | 390 |
| | 3106 | 3400 | 825 | 3588 | 3984 | 4252 | 3636 | 1630 | 2308 | 3431 | 3161 | 4045 |
| | 4701 | 411 | 1386 | 1855 | 2538 | 1249 | 1428 | 399 | 1210 | | | |
| 171: | 1998 | 4106 | 3065 | 488 | 1753 | 2054 | 3533 | 4114 | 4219 | 2916 | 4077 | 2259 |
| | 621 | 1962 | 929 | 4728 | 2083 | 391 | 2521 | 3606 | 4357 | 1003 | 1498 | 3345 |
| | 3022 | 1565 | | | | | | | | | | |
| 172: | 1403 | 1548 | 1545 | 2273 | 2963 | 1379 | 920 | 4324 | 2897 | 3086 | 3568 | 530 |
| | 4633 | 1535 | 1533 | 3967 | 2128 | 1206 | 1537 | 1952 | 2753 | 733 | 4171 | 271 |
| | 3054 | 3030 | 2907 | 3010 | 3546 | 1276 | 1833 | 4186 | 1432 | 1240 | 674 | 2518 |
| | 1148 | 2208 | 456 | 2076 | 1616 | 3538 | 4396 | 2155 | 3324 | 982 | 1534 | 1530 |
| | 4516 | 1633 | 344 | 2072 | 3137 | 2997 | 565 | 2524 | 2991 | 235 | 1941 | 2125 |
| | 4403 | 4167 | 3450 | 2541 | 1722 | 4177 | 2834 | 3013 | 1794 | 2700 | 2333 | 4426 |
| | 3358 | 3443 | 613 | 631 | 615 | 4732 | 3634 | 709 | 3127 | | | |
| 173: | 878 | 3586 | 2171 | 3138 | 3794 | 1345 | 3844 | 4699 | 2279 | 4015 | 4801 | 775 |
| | 2641 | 3615 | 2895 | 4705 | 1884 | 1422 | 987 | | | | | |
| 174: | 2497 | 1118 | 1460 | 1459 | 3463 | 3412 | 4569 | 2981 | 2681 | 3221 | 2377 | 4225 |
| | 2525 | 2515 | 1829 | 4191 | 3390 | 3387 | 3763 | 2994 | 251 | 1479 | 1975 | 4478 |
| | 2416 | 4634 | 1544 | 2476 | 2478 | 2424 | 3376 | 867 | 3175 | 1503 | 2460 | 489 |
| | 490 | 2372 | 2392 | 3047 | 1608 | 4733 | 1747 | 2871 | 4004 | 3560 | 1965 | 3460 |
| | 4229 | 4227 | 3044 | 2634 | 2192 | 1073 | 4333 | 3832 | 3064 | 3061 | 784 | 791 |
| | 3039 | 2604 | 2360 | 1890 | 2529 | 2550 | 3124 | 1113 | 3491 | 462 | 4685 | 1136 |
| | 1989 | 1013 | 3465 | 2978 | 2979 | 3799 | 518 | 806 | 3370 | 3116 | 3975 | 4785 |
| | 4783 | 4722 | 4385 | 1836 | 2216 | 2218 | 2193 | 705 | 2191 | 3308 | 3871 | 3961 |
| | 644 | 3490 | 3453 | 4203 | 4208 | 3471 | 2691 | 3727 | 2312 | 472 | 2926 | 2508 |
| | 1317 | 2280 | 711 | 859 | 2570 | 4723 | 1316 | 4150 | 3394 | 1783 | 2023 | 2035 |
| | 2465 | 2467 | 2468 | 1164 | 1167 | 3472 | 3348 | 3467 | 3018 | 3474 | 3107 | 3492 |
| | 4384 | 4211 | 3496 | 3497 | 1778 | 4205 | 3922 | 1886 | 4417 | 2249 | 496 | 2254 |
| | 700 | 3914 | 2352 | 3163 | 2485 | 2484 | 1362 | 4786 | 4780 | 2674 | 4784 | 882 |
| | 3923 | 3925 | 241 | 1559 | 586 | 2043 | 2138 | 1593 | 2812 | 1429 | 1376 | 233 |
| | 4815 | 2483 | 2482 | 3437 | 2559 | 2566 | 1992 | 2586 | 2555 | 2631 | 2614 | 302 |
| | 282 | 3045 | 1831 | 2438 | 1785 | 3148 | 3142 | 3473 | 2337 | 2275 | | |
| 175: | 871 | 3176 | 4274 | 773 | 1452 | 1271 | 4482 | 1977 | 4390 | 4526 | 4521 | 1272 |
| | 1604 | 2423 | 4026 | 3037 | 276 | 1905 | 3042 | 853 | 823 | 4058 | 510 | 3880 |
| 176: | 3424 | 1334 | 2204 | 4055 | 2472 | 1597 | 800 | 4431 | 1229 | 4358 | 4607 | 3908 |
| | 3511 | 3648 | 2169 | 1315 | 906 | 4523 | 4465 | 4471 | 2286 | 848 | 4017 | 638 |
| | 3859 | 3172 | | | | | | | | | | |
| 177: | 1682 | 3778 | 3772 | 1185 | 3792 | 3719 | 1048 | 1051 | 1056 | 1059 | 1054 | 3738 |
| | 4160 | 1795 | 3788 | 3791 | 4568 | 4664 | 3628 | 3006 | 2982 | 1082 | 1085 | 1014 |
| | 2679 | 3722 | 3215 | 3217 | 3216 | 999 | 300 | 304 | 4009 | 1393 | 728 | 2582 |
| | 4192 | 2725 | 2755 | 2754 | 3103 | 1829 | 3019 | 4812 | 4325 | 4326 | 1972 | 1125 |
| | 4479 | 689 | 2622 | 1433 | 4064 | 2777 | 2775 | 3941 | 1546 | 3313 | 3194 | 2127 |
| | 4355 | 1000 | 4773 | 3627 | 2405 | 2880 | 4753 | 3671 | 2101 | 3366 | 793 | 3374 |
| | 2846 | 4657 | 3728 | 3725 | 2460 | 4082 | 2744 | 2741 | 2773 | 2758 | 2770 | 2757 |
| | 2772 | 3575 | 973 | 968 | 966 | 996 | 1106 | 1104 | 1103 | 1110 | 2893 | 2909 |
| | 2937 | 1983 | 1981 | 3991 | 1683 | 2253 | 2344 | 4782 | 4760 | 4756 | 4754 | 3560 |
| | 1965 | 605 | 609 | 3135 | 3806 | 2756 | 3128 | 1020 | 1031 | 1030 | 1019 | 4442 |
| | 4441 | 2891 | 2655 | 3720 | 3717 | 2215 | 2743 | 905 | 908 | 2186 | 2202 | 2088 |
| | 455 | 1978 | 1979 | 2078 | 1114 | 4685 | 1510 | 4548 | 2301 | 1668 | 835 | 849 |
| | 838 | 529 | 1870 | 4432 | 3915 | 4216 | 2605 | 299 | 2892 | 1204 | 1201 | 4749 |
| | 4380 | 1166 | 284 | 995 | 2939 | 2910 | 1227 | 1221 | 1205 | 3784 | 404 | 1468 |
| | 1265 | 4002 | 2686 | 3960 | 1781 | 1780 | 4049 | 1171 | 1186 | 3526 | 3392 | 3549 |
| | 3987 | 4031 | 4052 | 4065 | 3099 | 1225 | 3281 | 1676 | 1622 | 1580 | 2228 | 3478 |
| | 1679 | 2010 | 1695 | 1701 | 1674 | 3257 | 4416 | 4649 | 2739 | 2736 | 4677 | 4665 |
| | 694 | 1976 | 1959 | 1777 | 1343 | 1954 | 1937 | 1751 | 4084 | 3952 | 4294 | 4810 |
| | 4037 | 4811 | 4250 | 950 | 2879 | 869 | 1693 | 3936 | 3935 | 3934 | 1288 | 590 |
| | 4100 | 2748 | 2833 | 1425 | 2310 | 4097 | 3708 | 1934 | 1344 | 1342 | 1385 | 4127 |
| | 3920 | 4680 | 4681 | 550 | 722 | 1943 | 1945 | 3651 | 1787 | 1197 | 3901 | 2665 |
| | 230 | 387 | 2663 | 2661 | 2657 | 3129 | 2091 | 3100 | 1658 | 1631 | 1582 | 1623 |
| | 1624 | 1585 | 1640 | 1598 | 1642 | 1599 | 1601 | 1645 | 1603 | 2285 | 1648 | 1605 |
| | 1652 | 3173 | 4095 | 913 | 928 | 927 | 924 | 3115 | 2581 | 495 | 2094 | 2917 |
| | 2896 | 1760 | 4594 | 1928 | 1925 | 1956 | 1957 | 1955 | 3739 | 4264 | 274 | 3899 |
| 178: | 2509 | 4461 | 1415 | 3486 | 3277 | 3545 | 3002 | 2292 | 512 | 2822 | 3619 | 4138 |
| | 1079 | 3896 | 4803 | 3635 | 2898 | 954 | 1212 | 4487 | 1310 | 1154 | 2544 | 1731 |
| | 2329 | 2771 | 4807 | 3883 | 4679 | 351 | 3510 | 4379 | 4533 | 3890 | 1834 | 2552 |
| | 513 | 573 | 1738 | 1109 | 831 | 2620 | 4398 | 881 | 4204 | 2561 | 1826 | 4050 |
| | 2012 | 1443 | 3079 | 1003 | 2113 | | | | | | | |
| 179: | 4608 | 4453 | 2712 | 3439 | 3136 | 3295 | 4212 | 1406 | 1409 | 1371 | 1404 | 1754 |
| | 3261 | 1587 | 1610 | 1612 | 1607 | 1595 | 2322 | 3995 | 3219 | 4405 | 3096 | 1450 |
| | 3461 | 3701 | 4091 | 3824 | 1213 | 1897 | 2615 | 1174 | 4567 | 2451 | 1478 | 3033 |
| | 3808 | 1427 | 2887 | 2884 | 2889 | 2924 | 3813 | 2095 | 1307 | 2067 | 2154 | 3259 |
| | 4532 | 2878 | 2164 | 4392 | 1084 | 2677 | 474 | 3765 | 2493 | 2539 | 2973 | |
| 180: | 2494 | 2981 | 2373 | 2376 | 3221 | 1699 | 1702 | 4460 | 2525 | 4430 | 1829 | 251 |
| | 2994 | 2416 | 3941 | 1546 | 3825 | 2478 | 2419 | 2424 | 3101 | 3376 | 2843 | 2844 |
| | 3175 | 1697 | 1718 | 1715 | 1677 | 1675 | 1503 | 2460 | 4468 | 2441 | 3771 | 1840 |
| | 4322 | 4733 | 1690 | 1712 | 1694 | 4184 | 3603 | 4004 | 4654 | 1370 | 4669 | 4661 |
| | 3021 | 1193 | 1172 | 1194 | 1041 | 1037 | 1040 | 1039 | 4172 | 4280 | 1102 | 4201 |
| | 3044 | 3076 | 2637 | 2223 | 797 | 813 | 784 | 2604 | 2360 | 2529 | 3124 | 4685 |
| | 1139 | 2886 | 1989 | 1909 | 3799 | 4550 | 3975 | 4797 | 704 | 1671 | 1643 | 1646 |
| | 1661 | 2188 | 1247 | 644 | 3490 | 3453 | 3471 | 4208 | 4462 | 3550 | 4298 | 676 |
| | 315 | 1944 | 4723 | 1316 | 4277 | 1783 | 1882 | 1190 | 3472 | 4524 | 3467 | 3018 |
| | 3107 | 3492 | 4211 | 3496 | 3497 | 460 | 2176 | 1360 | 458 | 701 | 440 | 4223 |
| | 854 | 3947 | 3809 | 4766 | 4043 | 1758 | 910 | 1743 | 2957 | 3209 | 3208 | 604 |
| | 3231 | 2159 | 753 | 3163 | 2485 | 3162 | 2733 | 884 | 1730 | 3256 | 4183 | 2765 |
| | 3602 | 1948 | 1466 | 2559 | 1121 | 1773 | 2553 | 1634 | 2438 | 1742 | 1737 | 1641 |
| | 3610 | 1887 | 3473 | 1827 | 1970 | 1359 | 655 | 293 | | | | |
| 181: | 2781 | 461 | 3916 | 2746 | 803 | 362 | 3956 | 2309 | 4719 | | | |
| 182: | 4106 | 2132 | 1669 | 193 | 3196 | 1512 | 1497 | 1050 | 2766 | 1498 | 1099 | 4218 |
| | 671 | 4108 | 2297 | | | | | | | | | |
| 183: | 2503 | 1500 | 2116 | 2671 | 1467 | 2214 | 277 | 1700 | 3052 | 1550 | 824 | 1880 |
| 184: | 2883 | 3007 | 3827 | 4079 | 2045 | 4104 | 2137 | 328 | 1408 | 2327 | 1157 | 1071 |
| | 3744 | 3504 | 4029 | 4027 | 4457 | 2721 | 2406 | 729 | 1126 | 1874 | 330 | 862 |
| | 290 | 2955 | 4113 | 2020 | 1116 | 1839 | | | | | | |
| 185: | 3385 | 2090 | 4000 | 1542 | 2687 | 2693 | 2690 | 2028 | 443 | 375 | 378 | 412 |
| | 413 | 352 | 1337 | 2562 | 3566 | 610 | 1098 | 4343 | 2454 | 3611 | 3608 | 949 |
| | 4375 | 4517 | 3658 | 2678 | 1947 | 482 | 4446 | 2796 | 2311 | 2362 | 2300 | 3797 |
| | 4542 | 957 | 444 | 446 | 958 | 473 | 470 | 468 | 465 | 4010 | 3159 | 393 |
| | 2357 | 2402 | 1895 | 389 | 2145 | 4410 | 4407 | 4443 | 4425 | 3640 | 2830 | 2008 |
| | 4445 | 342 | 337 | 340 | 3512 | 967 | 1704 | 2875 | 1380 | 3438 | 2751 | 856 |
| | 4448 | 4599 | 2837 | 2783 | 3520 | 4372 | 4360 | 4190 | 2673 | 2658 | 511 | 1584 |
| | 3108 | 2762 | 1745 | 3112 | | | | | | | | |
| 186: | 2132 | 1532 | 3533 | 4219 | 4114 | 2916 | 4077 | 2046 | 3878 | 2510 | 1146 | 1072 |
| | 1003 | 1498 | 1099 | | | | | | | | | |
| 187: | 975 | 972 | 3532 | 3513 | 4042 | 1475 | 1239 | 532 | 4704 | 1261 | 2522 | 2287 |
| | 1656 | 3831 | 1286 | 327 | 447 | 911 | 318 | 317 | 3050 | 3590 | 2036 | 3332 |
| | 687 | 801 | 1042 | 679 | 616 | 3378 | 2006 | 487 | 256 | | | |
| 188: | 3320 | 3758 | 3756 | 4000 | 2693 | 2687 | 2690 | 4718 | 375 | 378 | 2245 | 2248 |
| | 1097 | 608 | 2562 | 610 | 1098 | 3178 | 2134 | 339 | 894 | 1490 | 2454 | 4034 |
| | 3607 | 4439 | 4198 | 4083 | 4518 | 2826 | 1949 | 699 | 4446 | 3753 | 3159 | 393 |
| | 2357 | 2402 | 1895 | 3410 | 2145 | 4410 | 4407 | 4443 | 4425 | 2150 | 3893 | 4445 |
| | 1285 | 4674 | 612 | 1101 | 4599 | 2837 | 2783 | 4190 | 2673 | 2658 | 278 | 3105 |
| 189: | 2494 | 3158 | 3625 | 1460 | 4569 | 2981 | 4051 | 2373 | 1699 | 1702 | 2395 | 2525 |
| | 4430 | 1829 | 3035 | 3023 | 1680 | 3764 | 2356 | 4483 | 2416 | 2415 | 4634 | 3941 |
| | 3825 | 2478 | 1392 | 2419 | 2421 | 2436 | 2424 | 2394 | 2843 | 2844 | 3175 | 1718 |
| | 1697 | 1715 | 1677 | 1675 | 4643 | 4570 | 1503 | 4468 | 2378 | 2441 | 1840 | 3771 |
| | 1712 | 1690 | 1694 | 1766 | 2871 | 4184 | 3603 | 4654 | 1370 | 4004 | 4669 | 3560 |
| | 2064 | 4660 | 3003 | 1193 | 1172 | 1194 | 2645 | 4072 | 3220 | 3076 | 2223 | 797 |
| | 813 | 2604 | 1163 | 2866 | 3491 | 252 | 250 | 1139 | 2886 | 1909 | 306 | 1486 |
| | 2463 | 2479 | 3641 | 3799 | 4550 | 2599 | 3975 | 2301 | 4797 | 704 | 1671 | 1643 |
| | 1646 | 3669 | 2196 | 1247 | 644 | 1373 | 3490 | 3453 | 4203 | 4208 | 3471 | 2162 |
| | 2683 | 4162 | 4778 | 4723 | 4277 | 2953 | 1783 | 3225 | 2059 | 1170 | 3472 | 3264 |
| | 3263 | 1507 | 3467 | 3474 | 3492 | 4384 | 3496 | 4211 | 3497 | 3237 | 910 | 1743 |
| | 3957 | 3939 | 3914 | 2352 | 2350 | 2957 | 3208 | 753 | 1349 | 1382 | 2578 | 1730 |
| | 4183 | 1555 | 1556 | 3367 | 2765 | 1593 | 1376 | 1651 | 3602 | 1948 | 3437 | 2559 |
| | 1121 | 2555 | 2553 | 302 | 282 | 1636 | 3239 | 3117 | 2438 | 2440 | 1734 | 1765 |
| | 1641 | 3610 | 1673 | 4264 | 3473 | | | | | | | |
| 190: | 2494 | 3625 | 4236 | 4237 | 3412 | 2179 | 4569 | 2981 | 4051 | 3221 | 1699 | 1702 |
| | 2395 | 3241 | 4200 | 2525 | 4430 | 4141 | 4139 | 3035 | 1680 | 2356 | 4483 | 2416 |
| | 2415 | 4634 | 1392 | 2419 | 2421 | 2436 | 2424 | 2394 | 3175 | 1697 | 1718 | 1715 |
| | 1677 | 1675 | 4643 | 4570 | 1503 | 2460 | 2378 | 2392 | 2390 | 2443 | 2441 | 1690 |
| | 1694 | 1712 | 4736 | 2871 | 3603 | 4654 | 1370 | 2064 | 4660 | 1965 | 1984 | 3003 |
| | 1193 | 1172 | 1194 | 2645 | 4072 | 3220 | 3076 | 2220 | 813 | 767 | 769 | 3381 |
| | 2604 | 2360 | 2347 | 3491 | 252 | 2890 | 1579 | 3641 | 4304 | 3799 | 2732 | 4625 |
| | 4275 | 2763 | 546 | 1280 | 385 | 1904 | 3334 | 4550 | 4688 | 4133 | 3170 | 2301 |
| | 4797 | 704 | 1643 | 1671 | 1646 | 3669 | 2894 | 2496 | 1985 | 3958 | 3961 | 644 |
| | 3490 | 3453 | 4203 | 4208 | 3471 | 1901 | 1237 | 2575 | 2312 | 4708 | 3613 | 3949 |
| | 2636 | 2694 | 1292 | 2288 | 2289 | 2683 | 3761 | 4723 | 4150 | 4277 | 3394 | 1783 |
| | 2059 | 3252 | 3472 | 4524 | 3467 | 3018 | 3474 | 3107 | 1859 | 3537 | 976 | 2375 |
| | 3649 | 3359 | 799 | 4502 | 1203 | 3564 | 4601 | 3492 | 4384 | 3496 | 4211 | 3497 |
| | 4805 | 2278 | 650 | 4436 | 1094 | 3849 | 3642 | 312 | 1906 | 2992 | 457 | 4019 |
| | 3408 | 2009 | 348 | 3237 | 2118 | 1764 | 4170 | 1062 | 3542 | 1447 | 4530 | 2156 |
| | 2268 | 3926 | 1762 | 1141 | 3156 | 3379 | 2815 | 1451 | 4206 | 4166 | 3957 | 3939 |
| | 3914 | 2352 | 2350 | 2957 | 753 | 2485 | 1382 | 2578 | 1730 | 2219 | 4183 | 720 |
| | 1555 | 1556 | 3080 | 3102 | 2765 | 2689 | 1376 | 1117 | 1268 | 3602 | 4815 | 1948 |
| | 233 | 1466 | 3437 | 2559 | 1121 | 1773 | 2553 | 2555 | 2551 | 302 | 282 | 1636 |
| | 3239 | 3117 | 2438 | 2440 | 1734 | 1641 | 2778 | 3144 | 1303 | 1673 | 1887 | 4264 |
| | 1301 | 1327 | 3473 | 3418 | 1572 | | | | | | | |
| 191: | 3422 | 1173 | 2271 | 4411 | 3077 | 861 | 1933 | 4330 | 4769 | 3126 | 239 | 809 |
| | 3314 | 4290 | 3508 | 2703 | 3668 | 3291 | 3716 | 561 | 1538 | 4369 | 1857 | 3189 |
| | 2545 | 3273 | 637 | 2969 | 3973 | 3046 | 1055 | 602 | 3210 | 3212 | 1961 | 2507 |
| | 2505 | 3397 | 2667 | 1663 | 4345 | 3193 | 492 | 2669 | 571 | 984 | 1689 | 1705 |
| | 818 | 3678 | 3965 | 1775 | 3667 | 2365 | 4404 | 3278 | 1245 | 666 | | |
| 192: | 2818 | 2321 | 3500 | 2831 | 2750 | 2794 | 2793 | 309 | 4735 | 307 | 990 | 821 |
| | 2087 | 406 | 3785 | 4011 | 4046 | 2450 | 1353 | 3632 | 1655 | 1824 | 4393 | 4696 |
| | 1383 | 2404 | 372 | 3146 | 4329 | 1872 | 1449 | 1441 | 1444 | 1442 | 2420 | 3427 |
| | 953 | 956 | 1878 | 2593 | 3184 | 1440 | 2970 | 1296 | 2108 | 410 | | |
| 193: | 4106 | 2509 | 434 | 426 | 2259 | 1563 | 1561 | 2066 | 2041 | 4320 | 1187 | 1497 |
| | 2511 | 2510 | 3878 | 1458 | 1003 | 1498 | 1099 | 1512 | 1669 | | | |
| 194: | 2471 | 2520 | 3166 | 2251 | 2426 | 2558 | 4762 | 4085 | 448 | 1488 | 2983 | 3769 |
| | 2986 | 3767 | 4175 | 3937 | 4173 | 4675 | 2984 | 3815 | 4185 | 3811 | 2213 | 2085 |
| 195: | 1848 | 3647 | 860 | 3534 | 499 | 3721 | 789 | 1892 | 3306 | 2985 | 1461 | 2786 |
| | 3275 | 3468 | 3087 | 437 | 3800 | 2030 | 2477 | 2873 | 377 | 4507 | 2648 | 3692 |
| | 2930 | 2341 | 3321 | 3335 | 2231 | 4373 | 4376 | 350 | 4556 | 4763 | 4188 | 4496 |
| | 4281 | 322 | 4103 | 4742 | 4476 | 3782 | 1935 | 2624 | 1650 | 623 | 4412 | 1341 |
| | 2820 | 3464 | 4136 | 471 | 4721 | 1260 | 1557 | 3589 | 3051 | 2923 | 4207 | 870 |
| | 4408 | 1664 | 383 | 1053 | 1332 | 578 | 1381 | 1792 | 1736 | 2621 | 577 | 3228 |
| | 3804 | 2007 | 4336 | 3005 | 1575 | 4387 | | | | | | |
| 196: | 4129 | 1692 | 3621 | 2205 | 4429 | 3145 | 2353 | 4159 | 3290 | 1431 | 1437 | 3833 |
| | 3180 | 2768 | 1034 | 3656 | 2277 | 522 | 3213 | 2324 | 2060 | 1891 | 837 | 808 |
| | 517 | 4089 | 2968 | 1877 | 3402 | 4697 | 2437 | 3041 | 4310 | 3265 | 3802 | 3816 |
| | 2764 | 4306 | 1211 | 834 | 1369 | 1757 | 2580 | 2817 | 907 | 3118 | 2456 | 1100 |
| | 1252 | 2711 | 3661 | 2427 | 260 | 2121 | 2774 | 1375 | 403 | | | |
| 197: | 2888 | 2340 | 2730 | 1911 | 2869 | 1817 | 3839 | 4033 | 1267 | 659 | 3856 | 264 |
| | 1262 | 4529 | 287 | 936 | 1366 | 1008 | 2824 | 3130 | 3428 | 493 | 1057 | 3673 |
| | 2315 | 798 | 3689 | 4768 | | | | | | | | |
| 198: | 1015 | 3355 | 4300 | 275 | 4344 | 2120 | 2676 | 2284 | 2990 | 641 | 3143 | 2052 |
| | 3842 | 4119 | 2014 | 370 | 4662 | 4096 | 4152 | 1723 | 432 | 414 | 1436 | 3631 |
| | 3251 | 3963 | 3798 | 2422 | 4671 | 2999 | 1893 | 2738 | 2800 | 3853 | 2158 | 1149 |
| | 2585 | 2718 | 654 | 3363 | 3353 | 2780 | 2612 | 850 | 3933 | | | |
| 199: | 3795 | 4165 | 314 | 4506 | 382 | 3620 | 4560 | 3147 | 4739 | 3580 | 4596 | 1324 |
| | 4451 | 1815 | 1348 | 1346 | 661 | 1763 | 2710 | 651 | 1446 | 2175 | 4247 | 3466 |
| | 588 | 3515 | 1504 | 364 | 581 | 1822 | 1769 | 4295 | 4615 | 3442 | 409 | 1825 |
| | 2263 | 2194 | 1018 | 254 | 3293 | 1696 | 1771 | 2124 | 4509 | 1093 | 2504 | 4056 |
| | 4553 | 3583 | 3630 | 1224 | 2400 | 439 | | | | | | |
| 200: | 3900 | 2528 | 2316 | 1804 | 3488 | 1717 | 1953 | 3425 | 737 | 1064 | 1750 | 449 |
| | 3487 | 776 | 1179 | 2272 | 622 | 4269 | 2697 | 2029 | 4038 | 4504 | 392 | 1971 |
| | 427 | 3773 | 2018 | 2022 | 2031 | 2016 | 2021 | 691 | 1070 | 527 | 2737 | 3514 |
| | 3819 | 4422 | 2548 | 3659 | 1644 | 4311 | 844 | 1226 | 1389 | 1838 | | |
| 201: | 755 | 2004 | 3543 | 4356 | 752 | 3384 | 2274 | 2153 | 1609 | 464 | 4455 | 3587 |
| | 1964 | 3004 | 4494 | 3994 | 3614 | 4307 | 2114 | 4078 | 1228 | 1242 | 1554 | 1492 |
| | 2382 | 3705 | 2429 | 1772 | 1999 | 1791 | 4291 | 2235 | 2434 | 2606 | 2962 | |
| 202: | 2883 | 298 | 4590 | 852 | 1038 | 3786 | 3828 | 2267 | 2670 | 2933 | 2491 | 1071 |
| | 3744 | 2759 | 874 | 3043 | 1017 | 2998 | 4029 | 4027 | 4457 | 4761 | 1306 | 3186 |
| | 481 | 2596 | 3312 | 1708 | 1274 | 1092 | 916 | 3011 | 290 | 1487 | 2236 | |
| 203: | 3346 | 4602 | 2257 | 3863 | 2623 | 2827 | 1399 | 3528 | 4503 | 944 | 498 | 3676 |
| | 4800 | 817 | 1159 | 1049 | 3407 | 2430 | 3646 | 1511 | 980 | 1368 | 567 | 3406 |
| | 1412 | | | | | | | | | | | |
| 204: | 1403 | 2093 | 2273 | 1326 | 1483 | 2908 | 3596 | 3342 | 4633 | 1520 | 1716 | 750 |
| | 2492 | 2336 | 733 | 1222 | 4605 | 4171 | 526 | 3010 | 1602 | 1706 | 2931 | 4186 |
| | 1432 | 3686 | 1120 | 731 | 2140 | 734 | 1574 | 3712 | 768 | 4168 | 2187 | 3634 |
| | 2211 | | | | | | | | | | | |
| 205: | 1687 | 1632 | 4146 | 739 | 895 | 890 | 917 | 2761 | 898 | 2695 | 896 | 888 |
| | 902 | 883 | 3757 | 4317 | 4321 | 1638 | 4628 | 1238 | 1401 | 2002 | 1067 | 2838 |
| | 866 | 3141 | 4641 | 4161 | 4513 | 847 | 4640 | 3609 | 2489 | 3906 | 248 | 4638 |
| | 3684 | 1786 | 4651 | 1029 | 452 | 1801 | 2082 | 3579 | 2380 | 1665 | 2734 | 398 |
| | 3749 | 2915 | 3535 | 4469 | 1614 | 1654 | 4316 | 3990 | 1724 | 1472 | 4074 | 761 |
| | 2913 | 3368 | 1287 | 3554 | 3337 | 4650 | 2591 | 311 | 2182 | 3181 | 3285 | 1996 |
| | 2314 | 417 | 2881 | 507 | 3164 | 2291 | 1142 | 2577 | 374 | 1847 | 3038 | 1439 |
| | 851 | 3098 | 2464 | 4562 | 1529 | 3768 | 3921 | 3948 | 3110 | 4197 | 1135 | 3685 |
| | 3149 | 833 | 4230 | 3622 | 4659 | 1012 | 865 | 719 | 3469 | 2855 | 416 | 2841 |
| | 2782 | 1047 | 3735 | 1279 | 1782 | 2919 | 231 | 3349 | 1275 | 366 | 3000 | 4117 |
| | 2920 | 4220 | 3555 | 3812 | 2173 | 2170 | 2106 | 942 | 3691 | 4492 | 3638 | 1016 |
| | 1811 | 1474 | 2646 | 3674 | 3581 | 4182 | 1424 | 4388 | 692 | 4121 | 1134 | 1876 |
| | 4075 | 2767 | 970 | 652 | 4670 | 1621 | 3498 | 2906 | 1806 | 1199 | 2339 | 4642 |
| | 3843 | 3169 | 4495 | 4427 | 667 | 4092 | 2726 | 1823 | 2806 | 3536 | 2474 | 4024 |
| | 3924 | 4743 | 2147 | 2976 | 918 | 4587 | 1907 | 2958 | 3303 | 3693 | 3420 | 1283 |
| | 2502 | 258 | 4440 | 4123 | 1374 | 1560 | 770 | 422 | 4039 | 1908 | 469 | 1470 |
| | 1756 | 353 | 2199 | 1720 | 1729 | 1721 | 3723 | 4073 | 2514 | 2664 | 2512 | 1160 |
| | 2384 | 368 | 551 | 2675 | 2848 | 3153 | 3851 | 782 | 3182 | 483 | 1183 | 693 |
| | 2804 | 554 | 2081 | 730 | 1936 | 4720 | 3637 | 2618 | 3892 | 2595 | 3517 | 3616 |
| | 4444 | 3502 | 4062 | 1476 | 3426 | 4124 | 1105 | 1739 | 3095 | 2943 | 702 | 1414 |
| | 2068 | 979 | 683 | 246 | 2659 | 2334 | 810 | 1571 | 727 | 4458 | 558 | 3895 |
| | 726 | 4584 | 1733 | 4278 | 3742 | 1896 | 4537 | 2388 | 875 | 3093 | 925 | 941 |
| | 938 | 2554 | 940 | 1662 | 4467 | 4452 | 2868 | 4655 | 1223 | 3205 | 677 | 544 |
| | 2230 | 2227 | 569 | 548 | 564 | 566 | 3867 | 892 | 3869 | 2828 | 1639 | 2543 |
| | 2058 | 4071 | 626 | 2601 | 555 | 1269 | 2453 | 736 | 4480 | 3597 | 2409 | 2326 |
| | 3119 | 1150 | 521 | 3364 | 1140 | 658 | 4044 | 4399 | 4179 | 2932 | 2752 | 1685 |
| | 508 | 2172 | 3056 | 4740 | 4698 | 3857 | 3049 | 3134 | 774 | 3660 | 1232 | 2533 |
| | 1243 | 2946 | 486 | 1732 | 1244 | 3421 | 662 | 4459 | 1200 | 4684 | 3706 | 3344 |
| | 628 | 2698 | 575 | 3759 | 502 | 3552 | 3131 | 830 | 1063 | 3365 | 3897 | 724 |
| | 1400 | 4214 | 1620 | 1182 | 829 | 3894 | 1087 | 1218 | 2860 | 3681 | 371 | 2809 |
| | 4470 | 3214 | 2122 | 1290 | 519 | 3284 | 4348 | 3592 | 969 | 2207 | 4142 | 1902 |
| | 630 | 415 | 3248 | 4554 | 3519 | 771 | 3624 | 4302 | 4261 | 4239 | 4238 | 4260 |
| | 4254 | 4263 | 4242 | 4241 | 4240 | 4258 | 1526 | 4148 | 1543 | 4069 | 3840 | 3329 |
| | 2987 | 3938 | | | | | | | | | | |
| 206: | 685 | 1330 | 1241 | 1851 | 4788 | 2051 | 4617 | 2882 | 1755 | 4428 | 1108 | 3801 |
| | 2954 | 2565 | 1471 | 1485 | 4341 | 716 | 868 | 1879 | 1596 | 2921 | 4246 | 1494 |
| | 2850 | 1746 | 3672 | 3601 | | | | | | | | |
| 207: | 4106 | 2132 | 2509 | 3014 | 418 | 4609 | 2785 | 2904 | 633 | 779 | 2950 | 2338 |
| | 1532 | 3448 | 4629 | 4077 | 2259 | 2066 | 2041 | 1497 | 2302 | 2511 | 2682 | 1980 |
| | 787 | 2212 | 485 | 1138 | 4361 | 334 | 2936 | 1021 | 1003 | 1498 | 1099 | 1491 |
| | 2107 | 1852 | | | | | | | | | | |
| 208: | 4313 | 1862 | 1518 | 2097 | 2428 | 4144 | 347 | 4338 | 3604 | 2927 | 2117 | 4750 |
| | 4331 | 316 | 310 | 4534 | 229 | 4757 | 3140 | 2630 | 534 | 313 | 405 | 3986 |
| | 1710 | 1990 | 4314 | 1388 | 3881 | 2435 | 2972 | 4232 | 4176 | 639 | 923 | 2143 |
| | 2348 | 3810 | 2769 | 2389 | 2470 | | | | | | | |
| 209: | 4234 | 4337 | 329 | 4499 | 3666 | 533 | 3331 | 672 | 2200 | 4122 | 3710 | 3697 |
| | 3854 | 1499 | 3446 | 3413 | 1493 | 4653 | 257 | 3165 | 4712 | 2940 | | |
| 210: | 1147 | 265 | 476 | 1576 | 2033 | 594 | 3226 | 3198 | 1235 | 1340 | 4702 | 696 |
| | 1539 | 4585 | 4285 | 4364 | 4546 | 1590 | 2638 | 1208 | 4764 | 2713 | 1480 | 934 |
| | 2490 | 1477 | 2660 | 3262 | 2055 | 4370 | 407 | 2495 | 1749 | 3436 | 3476 | 2328 |
| | 3572 | 2282 | | | | | | | | | | |
| 211: | 1728 | 3229 | 3232 | 4292 | 3463 | 3479 | 2179 | 3412 | 4569 | 2981 | 2323 | 3221 |
| | 1699 | 1702 | 4200 | 2526 | 3247 | 3249 | 1829 | 4139 | 4141 | 3016 | 3017 | 1680 |
| | 4262 | 3227 | 3207 | 1969 | 4478 | 2416 | 4634 | 4293 | 1544 | 2478 | 1392 | 3083 |
| | 3377 | 867 | 3175 | 1697 | 1718 | 1677 | 1675 | 1503 | 2460 | 2392 | 2872 | 2874 |
| | 3047 | 4266 | 3771 | 1840 | 4733 | 1712 | 1690 | 1694 | 2871 | 3560 | 4201 | 3044 |
| | 1617 | 1619 | 2632 | 3832 | 1073 | 4333 | 794 | 791 | 784 | 2610 | 2604 | 2592 |
| | 2360 | 4149 | 2529 | 2550 | 2535 | 2531 | 3124 | 3491 | 462 | 4685 | 4221 | 1136 |
| | 1989 | 4610 | 1128 | 2463 | 2479 | 4304 | 4305 | 2978 | 3465 | 2979 | 3799 | 1329 |
| | 4550 | 1625 | 3975 | 2301 | 4746 | 4751 | 4748 | 4288 | 1643 | 1671 | 1646 | 1313 |
| | 4385 | 2244 | 2442 | 2239 | 1258 | 3932 | 4538 | 644 | 3453 | 3870 | 1901 | 4613 |
| | 2971 | 3325 | 2567 | 2575 | 431 | 4193 | 3206 | 3201 | 3203 | 2819 | 2590 | 4734 |
| | 2288 | 2537 | 2788 | 361 | 4790 | 3171 | 1966 | 2571 | 2568 | 4723 | 1316 | 2594 |
| | 3704 | 4150 | 3394 | 1783 | 1151 | 1155 | 1153 | 3252 | 3250 | 3472 | 1713 | 3283 |
| | 4524 | 3233 | 3018 | 3474 | 3107 | 839 | 840 | 842 | 2413 | 1350 | 3268 | 3287 |
| | 3680 | 1923 | 3423 | 1988 | 1606 | 1352 | 1711 | 1320 | 781 | 3492 | 4384 | 1751 |
| | 1993 | 4194 | 4776 | 4578 | 880 | 4391 | 4703 | 1115 | 3294 | 3435 | 4795 | 3841 |
| | 3914 | 2352 | 2481 | 3163 | 2959 | 2485 | 2484 | 1362 | 4127 | 3846 | 4747 | 3643 |
| | 4774 | 900 | 4752 | 3925 | 2219 | 242 | 1552 | 586 | 3080 | 3102 | 3082 | 3084 |
| | 3367 | 2043 | 2138 | 1593 | 2813 | 2342 | 1651 | 233 | 4815 | 2483 | 2482 | 2559 |
| | 2566 | 1121 | 2588 | 2589 | 2553 | 2551 | 3245 | 2614 | 2629 | 2607 | 2608 | 282 |
| | 302 | 2221 | 3847 | 3195 | 1831 | 2438 | 1788 | 1641 | 536 | 2304 | 538 | 3144 |
| | 1673 | 4264 | 1814 | 3886 | 3473 | 4639 | 4576 | 585 | | | | |
| 212: | 3386 | 1913 | 4531 | 3068 | 1473 | 1264 | 3279 | 4481 | 1796 | 1946 | 2791 | 3191 |
| | 1112 | | | | | | | | | | | |
| 213: | 4689 | 1448 | 151 | 3553 | 4631 | 4645 | 2609 | 4215 | 355 | 4484 | 587 | 429 |
| | 3114 | 1088 | 1076 | 3238 | 4724 | 2381 | 1304 | 2335 | 640 | | | |
| 214: | 3733 | 3732 | 3940 | 3074 | 2934 | 3999 | 3409 | 4623 | 2136 | 3868 | 4686 | 2133 |
| | 4563 | 4583 | 4557 | 2859 | 4561 | 2861 | 4586 | 4621 | 3063 | 475 | 1858 | 2040 |
| | 237 | 2283 | 3199 | 3998 | 3569 | 4597 | 3026 | 3567 | 4600 | 4543 | 2258 | 3884 |
| | 3911 | 3888 | 4630 | 2181 | 308 | 1968 | 4672 | 2086 | 2189 | 814 | 424 | 3626 |
| | 4111 | 1761 | 3258 | 780 | 2359 | 611 | 2935 | 2975 | 3457 | 4023 | 2131 | 4620 |
| | 3563 | 807 | 4101 | 788 | 2044 | 627 | 765 | 763 | 2075 | 4581 | 2069 | 2047 |
| | 4565 | 2096 | 4120 | 4656 | 828 | 805 | 804 | 4248 | 2938 | 3059 | 2974 | 4003 |
| | 3104 | 2977 | 3829 | 1165 | | | | | | | | |
| 215: | 4048 | 678 | 4464 | 802 | 645 | 4181 | 4652 | 2358 | 325 | 3204 | 670 | 3125 |
| | 4644 | 2157 | 3405 | 3266 | 4536 | 4058 | 510 | 1181 | 4692 | | | |
| 216: | 681 | 2506 | 819 | 2680 | 1430 | 1209 | 4217 | 3373 | 1541 | 2715 | 596 | 2317 |
| | 2459 | 2355 | 2611 | 3570 | 1384 | 1931 | 983 | 3741 | 1423 | 1958 | 4297 | 4512 |
| | 2439 | 4498 | 2393 | 2363 | | | | | | | | |
| 217: | 3320 | 3385 | 4000 | 2693 | 2687 | 2690 | 4718 | 378 | 412 | 2684 | 3814 | 4555 |
| | 352 | 1337 | 2562 | 1311 | 610 | 1098 | 3179 | 3178 | 4592 | 4591 | 2319 | 1089 |
| | 3489 | 2454 | 1611 | 4276 | 4034 | 1033 | 601 | 4377 | 4375 | 4663 | 1853 | 1856 |
| | 3388 | 2466 | 2993 | 514 | 3910 | 1169 | 3395 | 4154 | 1133 | 4446 | 4420 | 3753 |
| | 3797 | 1895 | 389 | 2145 | 4410 | 4407 | 4443 | 4425 | 3157 | 286 | 735 | 2144 |
| | 3340 | 754 | 4445 | 3774 | 342 | 337 | 340 | 3417 | 3012 | 1300 | 4099 | 4549 |
| | 4309 | 549 | 4195 | 3351 | 4624 | 3151 | 2256 | 4730 | 1130 | 430 | 4674 | 612 |
| | 1101 | 4599 | 2837 | 2783 | 721 | 846 | 4372 | 4360 | 511 | 4340 | 3796 | |
| 218: | 4691 | 4466 | 3495 | 4116 | 4727 | 740 | 4539 | 3025 | 1282 | 3945 | 4472 | 3942 |
| | 570 | 2790 | 1963 | 576 | 2816 | 2705 | 1657 | | | | | |
| 219: | 1973 | 3315 | 3347 | 245 | 1178 | 1518 | 3330 | 3760 | 4349 | 1156 | 1707 | 1251 |
| | 751 | 600 | 2331 | 955 | 1930 | 1915 | 2480 | 2374 | 4338 | 497 | 1917 | 1918 |
| | 1916 | 270 | 1189 | 281 | 3372 | 2574 | 316 | 310 | 232 | 4755 | 3140 | 313 |
| | 405 | 2944 | 4580 | 4255 | 3286 | 3654 | 2603 | 552 | 599 | 923 | 4520 | 2444 |
| | 2396 | 759 | 1727 | 3964 | | | | | | | | |
| 220: | 4327 | 1635 | 1850 | 4282 | 4433 | 3860 | 1698 | 2717 | 2918 | 3650 | 1305 | 2724 |
| | 706 | 4209 | 4021 | | | | | | | | | |
| 221: | 1001 | 3296 | 1845 | 3522 | 579 | 4353 | 2956 | 3740 | 4589 | 1132 | 1566 | 2557 |
| | 935 | 1137 | 669 | 2126 | 3726 | 2685 | 3707 | 919 | 4189 | 2092 | 4093 | 2391 |
| | 269 | | | | | | | | | | | |
| 222: | 1973 | 4315 | 4313 | 4627 | 3350 | 1802 | 531 | 1709 | 2123 | 3617 | 647 | 2480 |
| | 2374 | 347 | 4338 | 3604 | 3993 | 3734 | 4067 | 2174 | 1215 | 1495 | 1776 | 229 |
| | 4534 | 4757 | 4781 | 1672 | 3140 | 2630 | 2662 | 313 | 2290 | 1995 | 4303 | 2617 |
| | 3679 | 3480 | 3470 | 2364 | 2666 | 2455 | 3060 | 4700 | 2735 | 2348 | 2444 | 2389 |
| | 759 | 2740 | 2835 | 2729 | 3821 | | | | | | | |
| 223: | 2494 | 4569 | 4051 | 1699 | 1702 | 3241 | 2525 | 4430 | 1680 | 251 | 2994 | 1482 |
| | 1479 | 2416 | 2415 | 4634 | 1544 | 2478 | 1392 | 2419 | 2424 | 3376 | 3175 | 1718 |
| | 1697 | 1715 | 1677 | 1675 | 4643 | 4570 | 1503 | 2460 | 4733 | 1690 | 1712 | 1694 |
| | 2871 | 3560 | 4280 | 4201 | 3044 | 3076 | 2634 | 2637 | 791 | 784 | 813 | 767 |
| | 2604 | 2360 | 2529 | 3124 | 1113 | 3491 | 250 | 252 | 462 | 4685 | 1989 | 855 |
| | 1486 | 3799 | 1426 | 4156 | 4550 | 3975 | 2301 | 2814 | 1671 | 1643 | 1646 | 1844 |
| | 3669 | 644 | 3490 | 3453 | 4208 | 3471 | 1618 | 1901 | 758 | 1356 | 3053 | 756 |
| | 1281 | 3823 | 3826 | 2177 | 1783 | 3472 | 1713 | 3264 | 3283 | 3263 | 1507 | 3348 |
| | 3467 | 2401 | 1922 | 3029 | 646 | 4802 | 4211 | 3496 | 3497 | 4798 | 515 | 1177 |
| | 4366 | 3803 | 1457 | 394 | 1743 | 4711 | 3914 | 2352 | 2957 | 3163 | 2485 | 2219 |
| | 2810 | 2813 | 2812 | 1651 | 4815 | 1948 | 3437 | 2559 | 1121 | 2438 | 2440 | 1741 |
| | 1641 | 1673 | 3473 | 2556 | | | | | | | | |
| 224: | 2295 | 4094 | 4525 | 1885 | 1558 | 396 | 708 | 333 | 331 | 2203 | | |
| 225: | 4787 | 1413 | 1023 | 358 | 1521 | 1061 | 1312 | 4449 | 4130 | | | |
| 226: | 4709 | 3375 | 922 | 926 | 2077 | 3218 | | | | | | |
| 227: | 369 | 4098 | 4367 | 1649 | 3133 | 3120 | 547 | 1489 | 2229 | 2027 | 591 | 4604 |
| | 757 | 238 | | | | | | | | | | |
| 228: | 3434 | 1991 | 2185 | 3187 | 4155 | 4775 | 2294 | 3032 | 2911 | 1469 | 4105 | 4110 |
| | 4125 | 4107 | 4109 | 3652 | 4126 | 2692 | 4771 | 2487 | 688 | 2877 | 4770 | |

### Example 3

### Consensus Sequence Build

[0169] ClustalW program is selected for multiple sequence alignments of an amino acid sequence of SEQ ID NO: 115 and its homologs, through SEQ ID NO: 228 and its homologs. Three major factors affecting the sequence alignments dramatically are (1) protein weight matrices; (2) gap open penalty; (3) gap extension penalty. Protein weight matrices available for ClustalW program include Blosum, Pam and Gonnet series. Those parameters with gap open penalty and gap extension penalty were extensively tested. On the basis of the test results, Blosum weight matrix, gap open penalty of 10 and gap extension penalty of 1 were chosen for multiple sequence alignment. The consensus sequence of SEQ ID NO: 181 and its 9 homologs were derived according to the procedure described above and is displayed in FIG. 4.

### Example 4

### Pfam Module Annotation

[0170] This example illustrates the identification of domain and domain module by Pfam analysis.

[0171] The amino acid sequence of the expressed proteins that were shown to be associated with an enhanced trait were analyzed for Pfam protein family against the current Pfam collection of multiple sequence alignments and hidden Markov models using the HMMER software in the appended computer listing. The Pfam domain modules and individual protein domain for the proteins of SEQ ID NO: 115 through 228 are shown in Table 17 and Table 18 respectively. The Hidden Markov model databases for the identified patent families are also in the appended computer listing allowing identification of other homologous proteins and their cognate encoding DNA to enable the full breadth of the invention for a person of ordinary skill in the art. Certain proteins are identified by a single Pfam domain and others by multiple Pfam domains. For instance, the protein with amino acids of SEQ ID NO: 118 is characterized by two Pfam domains, i.e. “F-box” and “Tub”. See also the protein with amino acids of SEQ ID NO: 166 which is characterized by two copies of the Pfam domain “Myb_DNA-binding”. In Table 18 “score” is the gathering score for the Hidden Markov Model of the domain which exceeds the gathering cutoff reported in Table 19.

TABLE 17

| PEP | | | |
|---|---|---|---|
| Seq | Construct | | |
| ID | ID | Pfam Module | Position |
| 115 | CGPG110 | AP2 | 79-144 |
| 116 | CGPG1135 | zf-C2H2 | 126-149 |
| 117 | CGPG1180 | PLATZ | 30-141 |
| 118 | CGPG1197 | F-box::Tub | 31-87::98-380 |
| 119 | CGPG1802 | zf-C3HC4::YDG_SRA::zf-C3HC4 | 129-168::253-411::495-551 |
| 120 | CGPG2561 | SBP | 62-140 |
| 121 | CGPG2580 | HLH | 62-114 |
| 122 | CGPG2582 | AP2 | 42-106 |
| 123 | CGPG2591 | zf-B_box::zf-B_box | 1-47::58-101 |
| 124 | CGPG2597 | zf-C3HC4 | 111-152 |
| 125 | CGPG2602 | AP2 | 133-197 |
| 126 | CGPG2642 | HMG_box::HMG_box::HMG_box | 138-206::255-321::379-447 |
| 127 | CGPG2651 | zf-C3HC4 | 102-143 |
| 128 | CGPG2662 | zf-C2H2 | 152-175 |
| 129 | CGPG2708 | GATA | 223-258 |
| 130 | CGPG2710 | HLH | 211-261 |
| 131 | CGPG2722 | AP2 | 68-132 |
| 132 | CGPG2736 | NAM | 52-181 |
| 133 | CGPG2759 | zf-Dof | 143-205 |
| 134 | CGPG2765 | WRKY | 66-125 |
| 135 | CGPG2802 | AP2 | 42-106 |
| 136 | CGPG2823 | HMG_box | 193-260 |
| 137 | CGPG2889 | zf-CCCH::KH_1::zf-CCCH | 21-43::95-157::186-211 |
| 138 | CGPG2902 | SRF-TF | 14-64 |
| 139 | CGPG2913 | WRKY | 222-281 |
| 140 | CGPG2945 | zf-C3HC4 | 117-158 |
| 141 | CGPG2962 | zf-Dof | 35-97 |
| 142 | CGPG2967 | zf-Dof | 20-82 |
| 143 | CGPG2983 | AP2 | 94-158 |
| 144 | CGPG2996 | AP2 | 83-148 |
| 145 | CGPG3307 | DUF248 | 95-605 |
| 146 | CGPG3311 | zf-C2H2 | 89-111 |
| 147 | CGPG3350 | SRF-TF::K-box | 9-59::75-173 |
| 148 | CGPG3355 | zf-Dof | 24-86 |
| 149 | CGPG3447 | zf-C2H2 | 117-140 |
| 150 | CGPG3453 | Myb_DNA-binding::Myb_DNA-binding | 13-59::65-110 |
| 152 | CGPG3455 | Myb_DNA-binding::Myb_DNA- | 75-121::127-173::179-224 |
| | | binding::Myb_DNA-binding | |
| 153 | CGPG3488 | SRF-TF | 9-59 |
| 154 | CGPG353 | Pex2_Pex12::zf-C3HC4 | 41-270::327-364 |
| 155 | CGPG3537 | bZIP_2 | 68-122 |
| 156 | CGPG355 | HLH | 309-359 |
| 157 | CGPG3751 | GRAS | 154-454 |
| 158 | CGPG3755 | Myb_DNA-binding | 107-157 |
| 159 | CGPG3756 | GRAS | 119-426 |
| 160 | CGPG3757 | F-box | 38-85 |
| 161 | CGPG3776 | GRAS | 118-437 |
| 162 | CGPG3778 | WRKY | 109-171 |
| 163 | CGPG3799 | AT_hook::DUF296 | 76-88::160-280 |
| 164 | CGPG3822 | GRAS | 248-550 |
| 165 | CGPG3890 | Myb_DNA-binding::Myb_DNA-binding | 105-151::157-202 |
| 166 | CGPG3965 | Myb_DNA-binding::Myb_DNA-binding | 17-66::72-117 |
| 167 | CGPG3966 | HLH | 74-125 |
| 168 | CGPG3974 | zf-C2H2 | 94-116 |
| 169 | CGPG3977 | NAM | 11-135 |
| 170 | CGPG3984 | zf-B_box::zf-B_box | 1-47::52-99 |
| 171 | CGPG3988 | Myb_DNA-binding | 98-145 |
| 172 | CGPG4068 | NAM | 7-132 |
| 173 | CGPG4105 | PHD | 198-248 |
| 174 | CGPG4109 | SRF-TF::K-box | 9-59::75-175 |
| 175 | CGPG4125 | zf-C3HC4 | 156-196 |
| 176 | CGPG4126 | HLH | 129-178 |
| 177 | CGPG4167 | SRF-TF::K-box | 9-59::71-173 |
| 178 | CGPG4176 | Myb_DNA-binding | 9-58 |
| 179 | CGPG4193 | WRKY | 243-303 |
| 180 | CGPG4210 | SRF-TF::K-box | 9-59::78-174 |
| 182 | CGPG4540 | Myb_DNA-binding | 94-141 |
| 184 | CGPG4571 | Myb_DNA-binding::Linker_histone | 5-57::126-201 |
| 185 | CGPG4622 | Myb_DNA-binding::Myb_DNA-binding | 12-59::65-110 |
| 186 | CGPG4700 | Myb_DNA-binding::Myb_DNA-binding | 5-56::134-181 |
| 187 | CGPG475 | bZIP_1 | 89-142 |
| 188 | CGPG478 | Myb_DNA-binding::Myb_DNA-binding | 14-61::67-112 |
| 189 | CGPG497 | SRF-TF::K-box | 9-59::74-173 |
| 190 | CGPG5283 | SRF-TF::K-box | 25-75::88-189 |
| 191 | CGPG5284 | CBFD_NFYB_HMF | 102-166 |
| 192 | CGPG5294 | AUX_IAA | 11-192 |
| 193 | CGPG5308 | Myb_DNA-binding::Myb_DNA-binding | 11-60::117-164 |
| 194 | CGPG5322 | LIM::LIM | 11-68::110-167 |
| 195 | CGPG5427 | IBR | 208-271 |
| 196 | CGPG5595 | SET | 746-874 |
| 197 | CGPG5806 | bZIP_1 | 169-233 |
| 198 | CGPG626 | Mov34 | 54-168 |
| 199 | CGPG6434 | ZZ::Myb_DNA-binding::SWIRM | 1-46::62-108::349-434 |
| 200 | CGPG688 | bZIP_1 | 187-245 |
| 201 | CGPG7334 | E2F_TDP::E2F_TDP | 12-77::148-224 |
| 202 | CGPG7339 | Myb_DNA-binding | 5-57 |
| 203 | CGPG7350 | Prefoldin | 24-143 |
| 204 | CGPG7475 | NAM | 18-147 |
| 205 | CGPG7493 | HD-ZIP_N::Homeobox::HALZ | 1-115::141-195::196-240 |
| 207 | CGPG7598 | Myb_DNA-binding::Myb_DNA-binding | 30-79::136-183 |
| 208 | CGPG7600 | AP2 | 20-84 |
| 209 | CGPG7604 | GATA | 212-247 |
| 210 | CGPG7615 | zf-C3HC4 | 150-187 |
| 211 | CGPG7630 | SRF-TF::K-box | 9-59::75-174 |
| 212 | CGPG7631 | bZIP_1 | 121-178 |
| 214 | CGPG7644 | TCP | 38-253 |
| 215 | CGPG7691 | zf-C3HC4 | 30-76 |
| 216 | CGPG7696 | Ank::Ank::zf-CCCH::zf-CCCH | 77-112::114-149::270-295 |
| | | | ::305-327 |
| 217 | CGPG7703 | Myb_DNA-binding::Myb_DNA-binding | 14-61::67-112 |
| 218 | CGPG7707 | TCP | 16-209 |
| 219 | CGPG7731 | AP2 | 111-176 |
| 220 | CGPG7734 | ZZ | 307-360 |
| 221 | CGPG7753 | zf-C2H2::zf-C2H2 | 62-84::142-164 |
| 222 | CGPG7836 | AP2 | 23-87 |
| 223 | CGPG7867 | SRF-TF::K-box | 9-59::85-175 |
| 224 | CGPG8105 | B3 | 128-225 |
| 225 | CGPG8132 | zf-LSD1::zf-LSD1 | 63-87::101-125 |
| 227 | CGPG8175 | HLH | 86-135 |

TABLE 18

| PEP Seq | Construct | Pfam domain | | | | |
|---|---|---|---|---|---|---|
| ID No. | ID | name | begin | start | score | E-value |
| 115 | CGPG110 | AP2 | 79 | 144 | 152.7 | 9.50E−43 |
| 116 | CGPG1135 | zf-C2H2 | 126 | 149 | 19.8 | 0.0097 |
| 117 | CGPG1180 | PLATZ | 30 | 141 | 288.2 | 1.60E−83 |
| 118 | CGPG1197 | F-box | 31 | 87 | 36.1 | 1.20E−07 |
| 118 | CGPG1197 | Tub | 98 | 380 | 627.7 | 1.00E−185 |
| 119 | CGPG1802 | zf-C3HC4 | 129 | 168 | 36.9 | 6.90E−08 |
| 119 | CGPG1802 | YDG_SRA | 253 | 411 | 259.6 | 6.20E−75 |
| 119 | CGPG1802 | zf-C3HC4 | 495 | 551 | 28.9 | 1.70E−05 |
| 120 | CGPG2561 | SBP | 62 | 140 | 187.5 | 3.10E−53 |
| 121 | CGPG2580 | HLH | 62 | 114 | 67 | 6.30E−17 |
| 122 | CGPG2582 | AP2 | 42 | 106 | 148.8 | 1.50E−41 |
| 123 | CGPG2591 | zf-B_box | 1 | 47 | 39.8 | 9.50E−09 |
| 123 | CGPG2591 | zf-B_box | 58 | 101 | 44.3 | 4.20E−10 |
| 124 | CGPG2597 | zf-C3HC4 | 111 | 152 | 36.5 | 9.20E−08 |
| 125 | CGPG2602 | AP2 | 133 | 197 | 138.5 | 1.80E−38 |
| 126 | CGPG2642 | HMG_box | 138 | 206 | 71.4 | 2.90E−18 |
| 126 | CGPG2642 | HMG_box | 255 | 321 | 84.2 | 3.90E−22 |
| 126 | CGPG2642 | HMG_box | 379 | 447 | 77.6 | 4.00E−20 |
| 127 | CGPG2651 | zf-C3HC4 | 102 | 143 | 39.9 | 9.00E−09 |
| 128 | CGPG2662 | zf-C2H2 | 152 | 175 | 20.1 | 0.0078 |
| 129 | CGPG2708 | GATA | 223 | 258 | 67.8 | 3.50E−17 |
| 130 | CGPG2710 | HLH | 211 | 261 | 32.6 | 1.40E−06 |
| 131 | CGPG2722 | AP2 | 68 | 132 | 138.3 | 2.10E−38 |
| 132 | CGPG2736 | NAM | 52 | 181 | 56.9 | 6.80E−14 |
| 133 | CGPG2759 | zf-Dof | 143 | 205 | 132.1 | 1.60E−36 |
| 134 | CGPG2765 | WRKY | 66 | 125 | 141.6 | 2.10E−39 |
| 135 | CGPG2802 | AP2 | 42 | 106 | 135.2 | 1.80E−37 |
| 136 | CGPG2823 | HMG_box | 193 | 260 | 32.9 | 1.20E−06 |
| 137 | CGPG2889 | zf-CCCH | 21 | 43 | 4.4 | 0.35 |
| 137 | CGPG2889 | KH_1 | 95 | 157 | 58.8 | 1.70E−14 |
| 137 | CGPG2889 | zf-CCCH | 186 | 211 | 46 | 1.30E−10 |
| 138 | CGPG2902 | SRF-TF | 14 | 64 | 29.5 | 1.20E−05 |
| 139 | CGPG2913 | WRKY | 222 | 281 | 144.4 | 3.00E−40 |
| 140 | CGPG2945 | zf-C3HC4 | 117 | 158 | 21.3 | 0.00098 |
| 141 | CGPG2962 | zf-Dof | 35 | 97 | 134.3 | 3.40E−37 |
| 142 | CGPG2967 | zf-Dof | 20 | 82 | 126.1 | 9.60E−35 |
| 143 | CGPG2983 | AP2 | 94 | 158 | 75.7 | 1.50E−19 |
| 144 | CGPG2996 | AP2 | 83 | 148 | 137.1 | 4.90E−38 |
| 145 | CGPG3307 | DUF248 | 95 | 605 | 1274.5 | 0 |
| 146 | CGPG3311 | zf-C2H2 | 89 | 111 | 23 | 0.001 |
| 147 | CGPG3350 | SRF-TF | 9 | 59 | 106.1 | 1.00E−28 |
| 147 | CGPG3350 | K-box | 75 | 173 | 108.1 | 2.60E−29 |
| 148 | CGPG3355 | zf-Dof | 24 | 86 | 139.1 | 1.20E−38 |
| 149 | CGPG3447 | zf-C2H2 | 117 | 140 | 20.2 | 0.0074 |
| 150 | CGPG3453 | Myb_DNA-binding | 13 | 59 | 60 | 7.50E−15 |
| 150 | CGPG3453 | Myb_DNA-binding | 65 | 110 | 48.9 | 1.70E−11 |
| 152 | CGPG3455 | Myb_DNA-binding | 75 | 121 | 54.7 | 3.00E−13 |
| 152 | CGPG3455 | Myb_DNA-binding | 127 | 173 | 59.3 | 1.30E−14 |
| 152 | CGPG3455 | Myb_DNA-binding | 179 | 224 | 44.6 | 3.40E−10 |
| 153 | CGPG3488 | SRF-TF | 9 | 59 | 66.2 | 1.00E−16 |
| 154 | CGPG353 | Pex2_Pex12 | 41 | 270 | 288.3 | 1.40E−83 |
| 154 | CGPG353 | zf-C3HC4 | 327 | 364 | 29.3 | 1.30E−05 |
| 155 | CGPG3537 | bZIP_1 | 68 | 132 | 28.3 | 2.80E−05 |
| 155 | CGPG3537 | bZIP_2 | 68 | 122 | 47.8 | 3.70E−11 |
| 156 | CGPG355 | HLH | 309 | 359 | 32.8 | 1.20E−06 |
| 157 | CGPG3751 | GRAS | 154 | 454 | 524.7 | 1.00E−154 |
| 158 | CGPG3755 | Myb_DNA-binding | 107 | 157 | 43.6 | 6.50E−10 |
| 159 | CGPG3756 | GRAS | 119 | 426 | 385.6 | 7.60E−113 |
| 160 | CGPG3757 | F-box | 38 | 85 | 43.3 | 8.20E−10 |
| 161 | CGPG3776 | GRAS | 118 | 437 | 450.8 | 1.80E−132 |
| 162 | CGPG3778 | WRKY | 109 | 171 | 93.5 | 6.60E−25 |
| 163 | CGPG3799 | AT_hook | 76 | 88 | 19.1 | 0.012 |
| 163 | CGPG3799 | DUF296 | 160 | 280 | 218.5 | 1.50E−62 |
| 164 | CGPG3822 | GRAS | 248 | 550 | 469.7 | 3.70E−138 |
| 165 | CGPG3890 | Myb_DNA-binding | 105 | 151 | 54.9 | 2.70E−13 |
| 165 | CGPG3890 | Myb_DNA-binding | 157 | 202 | 46.9 | 6.80E−11 |
| 166 | CGPG3965 | Myb_DNA-binding | 17 | 66 | 44.9 | 2.80E−10 |
| 166 | CGPG3965 | Myb_DNA-binding | 72 | 117 | 39.8 | 9.30E−09 |
| 167 | CGPG3966 | HLH | 74 | 125 | 39.7 | 9.70E−09 |
| 168 | CGPG3974 | zf-C2H2 | 94 | 116 | 22.4 | 0.0016 |
| 169 | CGPG3977 | NAM | 11 | 135 | 260.6 | 3.10E−75 |
| 170 | CGPG3984 | zf-B_box | 1 | 47 | 51 | 4.00E−12 |
| 170 | CGPG3984 | zf-B_box | 52 | 99 | 58.5 | 2.20E−14 |
| 171 | CGPG3988 | Myb_DNA-binding | 98 | 145 | 40.9 | 4.30E−09 |
| 172 | CGPG4068 | NAM | 7 | 132 | 301.1 | 2.10E−87 |
| 173 | CGPG4105 | PHD | 198 | 248 | 56.1 | 1.10E−13 |
| 174 | CGPG4109 | SRF-TF | 9 | 59 | 116.6 | 7.00E−32 |
| 174 | CGPG4109 | K-box | 75 | 175 | 147.1 | 4.50E−41 |
| 175 | CGPG4125 | zf-C3HC4 | 156 | 196 | 27.9 | 3.50E−05 |
| 176 | CGPG4126 | HLH | 129 | 178 | 35.9 | 1.40E−07 |
| 177 | CGPG4167 | SRF-TF | 9 | 59 | 113.7 | 5.40E−31 |
| 177 | CGPG4167 | K-box | 71 | 173 | 74.5 | 3.40E−19 |
| 178 | CGPG4176 | Myb_DNA-binding | 9 | 58 | 31.5 | 2.90E−06 |
| 179 | CGPG4193 | WRKY | 243 | 303 | 143.4 | 6.20E−40 |
| 180 | CGPG4210 | SRF-TF | 9 | 59 | 104.2 | 3.70E−28 |
| 180 | CGPG4210 | K-box | 78 | 174 | 44.1 | 4.60E−10 |
| 182 | CGPG4540 | Myb_DNA-binding | 94 | 141 | 47.2 | 5.70E−11 |
| 184 | CGPG4571 | Myb_DNA-binding | 5 | 57 | 33.4 | 8.20E−07 |
| 184 | CGPG4571 | Linker_histone | 126 | 201 | 25.8 | 2.60E−05 |
| 185 | CGPG4622 | Myb_DNA-binding | 12 | 59 | 40.5 | 5.60E−09 |
| 185 | CGPG4622 | Myb_DNA-binding | 65 | 110 | 41.6 | 2.70E−09 |
| 186 | CGPG4700 | Myb_DNA-binding | 5 | 56 | 39.7 | 1.00E−08 |
| 186 | CGPG4700 | Myb_DNA-binding | 134 | 181 | 43.9 | 5.50E−10 |
| 187 | CGPG475 | bZIP_1 | 89 | 142 | 28.7 | 2.00E−05 |
| 187 | CGPG475 | bZIP_2 | 89 | 139 | 17.9 | 0.011 |
| 188 | CGPG478 | Myb_DNA-binding | 14 | 61 | 48.8 | 1.90E−11 |
| 188 | CGPG478 | Myb_DNA-binding | 67 | 112 | 48.5 | 2.30E−11 |
| 189 | CGPG497 | SRF-TF | 9 | 59 | 121 | 3.30E−33 |
| 189 | CGPG497 | K-box | 74 | 173 | 150.5 | 4.60E−42 |
| 190 | CGPG5283 | SRF-TF | 25 | 75 | 118.8 | 1.60E−32 |
| 190 | CGPG5283 | K-box | 88 | 189 | 160 | 6.00E−45 |
| 191 | CGPG5284 | Histone | 96 | 169 | 53.2 | 8.70E−13 |
| 191 | CGPG5284 | CBFD_NFYB_HMF | 102 | 166 | 93.4 | 6.90E−25 |
| 192 | CGPG5294 | AUX_IAA | 11 | 192 | 391.1 | 1.60E−114 |
| 193 | CGPG5308 | Myb_DNA-binding | 11 | 60 | 22.5 | 0.0016 |
| 193 | CGPG5308 | Myb_DNA-binding | 117 | 164 | 48.6 | 2.10E−11 |
| 194 | CGPG5322 | LIM | 11 | 68 | 53.4 | 7.70E−13 |
| 194 | CGPG5322 | LIM | 110 | 167 | 63.9 | 5.20E−16 |
| 195 | CGPG5427 | IBR | 208 | 271 | 85 | 2.30E−22 |
| 196 | CGPG5595 | SET | 746 | 874 | 159.9 | 6.70E−45 |
| 197 | CGPG5806 | bZIP_1 | 169 | 233 | 28.2 | 2.80E−05 |
| 197 | CGPG5806 | bZIP_2 | 169 | 223 | 24.7 | 0.00033 |
| 198 | CGPG626 | Mov34 | 54 | 168 | 178.6 | 1.50E−50 |
| 199 | CGPG6434 | ZZ | 1 | 46 | 85.2 | 2.00E−22 |
| 199 | CGPG6434 | Myb_DNA-binding | 62 | 108 | 48.1 | 3.10E−11 |
| 199 | CGPG6434 | SWIRM | 349 | 434 | 83.2 | 7.90E−22 |
| 200 | CGPG688 | bZIP_1 | 187 | 245 | 46 | 1.30E−10 |
| 200 | CGPG688 | bZIP_2 | 188 | 241 | 44.6 | 3.30E−10 |
| 201 | CGPG7334 | E2F_TDP | 12 | 77 | 115.1 | 2.00E−31 |
| 201 | CGPG7334 | E2F_TDP | 148 | 224 | 119 | 1.30E−32 |
| 202 | CGPG7339 | Myb_DNA-binding | 5 | 57 | 35 | 2.60E−07 |
| 203 | CGPG7350 | Prefoldin | 24 | 143 | 126.1 | 9.60E−35 |
| 204 | CGPG7475 | NAM | 18 | 147 | 257.9 | 2.00E−74 |
| 205 | CGPG7493 | HD-ZIP_N | 1 | 115 | 139.2 | 1.10E−38 |
| 205 | CGPG7493 | Homeobox | 141 | 195 | 72 | 1.90E−18 |
| 205 | CGPG7493 | HALZ | 196 | 240 | 89.5 | 1.00E−23 |
| 207 | CGPG7598 | Myb_DNA-binding | 30 | 79 | 48.6 | 2.10E−11 |
| 207 | CGPG7598 | Myb_DNA-binding | 136 | 183 | 49.6 | 1.10E−11 |
| 208 | CGPG7600 | AP2 | 20 | 84 | 143.2 | 6.90E−40 |
| 209 | CGPG7604 | GATA | 212 | 247 | 67.2 | 5.30E−17 |
| 210 | CGPG7615 | zf-C3HC4 | 150 | 187 | 33.4 | 7.70E−07 |
| 211 | CGPG7630 | SRF-TF | 9 | 59 | 111.6 | 2.20E−30 |
| 211 | CGPG7630 | K-box | 75 | 174 | 157.8 | 2.80E−44 |
| 212 | CGPG7631 | bZIP_1 | 121 | 178 | 30.1 | 7.80E−06 |
| 212 | CGPG7631 | bZIP_2 | 121 | 175 | 26.1 | 0.00013 |
| 214 | CGPG7644 | TCP | 38 | 253 | 139.2 | 1.10E−38 |
| 215 | CGPG7691 | zf-C3HC4 | 30 | 76 | 28.2 | 2.90E−05 |
| 216 | CGPG7696 | Ank | 77 | 112 | 13.1 | 0.4 |
| 216 | CGPG7696 | Ank | 114 | 149 | 31.7 | 2.60E−06 |
| 216 | CGPG7696 | zf-CCCH | 270 | 295 | 27.2 | 6.00E−05 |
| 216 | CGPG7696 | zf-CCCH | 305 | 327 | 0.4 | 1.2 |
| 217 | CGPG7703 | Myb_DNA-binding | 14 | 61 | 51.5 | 2.80E−12 |
| 217 | CGPG7703 | Myb_DNA-binding | 67 | 112 | 34.7 | 3.10E−07 |
| 218 | CGPG7707 | TCP | 16 | 209 | 149.1 | 1.20E−41 |
| 219 | CGPG7731 | AP2 | 111 | 176 | 146.8 | 5.70E−41 |
| 220 | CGPG7734 | ZZ | 307 | 360 | 27 | 6.50E−05 |
| 221 | CGPG7753 | zf-C2H2 | 62 | 84 | 27.3 | 5.30E−05 |
| 221 | CGPG7753 | zf-C2H2 | 142 | 164 | 23.6 | 0.00071 |
| 222 | CGPG7836 | AP2 | 23 | 87 | 134.4 | 3.20E−37 |
| 223 | CGPG7867 | SRF-TF | 9 | 59 | 95.2 | 1.90E−25 |
| 223 | CGPG7867 | K-box | 85 | 175 | 22.5 | 5.60E−06 |
| 224 | CGPG8105 | B3 | 128 | 225 | 82.2 | 1.60E−21 |
| 225 | CGPG8132 | zf-LSD1 | 63 | 87 | 50.1 | 7.30E−12 |
| 225 | CGPG8132 | zf-LSD1 | 101 | 125 | 54.5 | 3.50E−13 |
| 227 | CGPG8175 | HLH | 86 | 135 | 32.2 | 1.80E−06 |

TABLE 19

| | | gathering | |
|---|---|---|---|
| Pfam domain name | Accession # | cutoff | domain description |
| AT_hook | PF02178.9 | 3.6 | AT hook motif |
| AUX_IAA | PF02309.7 | −83 | AUX/IAA family |
| Ank | PF00023.20 | 0 | Ankyrin repeat |
| B3 | PF02362.12 | 26.5 | B3 DNA binding domain |
| CBFD_NFYB_HMF | PF00808.13 | 18.4 | Histone-like transcription factor (CBF/NF-Y) and |
| | | | archaeal histone |
| DUF248 | PF03141.7 | −363.8 | Putative methyltransferase |
| DUF296 | PF03479.5 | −11 | Domain of unknown function (DUF296) |
| E2F_TDP | PF02319.11 | 17 | E2F/DP family winged-helix DNA-binding domain |
| F-box | PF00646.23 | 13.9 | F-box domain |
| GATA | PF00320.17 | 28.5 | GATA zinc finger |
| GRAS | PF03514.5 | −78 | GRAS family transcription factor |
| HALZ | PF02183.8 | 17 | Homeobox associated leucine zipper |
| HD-ZIP_N | PF04618.3 | 25 | HD-ZIP protein N terminus |
| HLH | PF00010.16 | 8.3 | Helix-loop-helix DNA-binding domain |
| HMG_box | PF00505.9 | 4.1 | HMG (high mobility group) box |
| Histone | PF00125.14 | 17.4 | Core histone H2A/H2B/H3/H4 |
| Homeobox | PF00046.19 | −4.1 | Homeobox domain |
| IBR | PF01485.11 | 0 | IBR domain |
| K-box | PF01486.8 | 0 | K-box region |
| KH_1 | PF00013.19 | 10.5 | KH domain |
| LIM | PF00412.12 | 0 | LIM domain |
| Linker_histone | PF00538.9 | −8 | linker histone H1 and H5 family |
| Mov34 | PF01398.11 | −4 | Mov34/MPN/PAD-1 family |
| Myb_DNA-binding | PF00249.21 | 14 | Myb-like DNA-binding domain |
| NAM | PF02365.6 | −19 | No apical meristem (NAM) protein |
| PHD | PF00628.19 | 25.9 | PHD-finger |
| PLATZ | PF04640.4 | 20 | PLATZ transcription factor |
| Pex2_Pex12 | PF04757.5 | −50 | Pex2/Pex12 amino terminal region |
| Prefoldin | PF02996.8 | 9.3 | Prefoldin subunit |
| SBP | PF03110.5 | 25 | SBP domain |
| SET | PF00856.18 | 23.5 | SET domain |
| SRF-TF | PF00319.9 | 11 | SRF-type transcription factor (DNA-binding and |
| | | | dimerisation domain) |
| SWIRM | PF04433.7 | 25 | SWIRM domain |
| TCP | PF03634.4 | −38 | TCP family transcription factor |
| Tub | PF01167.8 | −98 | Tub family |
| WRKY | PF03106.6 | 25 | WRKY DNA-binding domain |
| YDG_SRA | PF02182.8 | 25 | YDG/SRA domain |
| ZZ | PF00569.8 | 14 | Zinc finger, ZZ type |
| bZIP_1 | PF00170.11 | 24.5 | bZIP transcription factor |
| bZIP_2 | PF07716.5 | 15 | Basic region leucine zipper |
| zf-B_box | PF00643.14 | 15.3 | B-box zinc finger |
| zf-C2H2 | PF00096.16 | 17.7 | Zinc finger, C2H2 type |
| zf-C3HC4 | PF00097.15 | 16 | Zinc finger, C3HC4 type (RING finger) |
| zf-CCCH | PF00642.15 | 0 | Zinc finger C-x8-C-x5-C-x3-H type (and similar) |
| zf-Dof | PF02701.6 | 25 | Dof domain, zinc finger |
| zf-LSD1 | PF06943.3 | 25 | LSD1 zinc finger |

### Example 5

### Plasmid Construction for Transferring Recombinant DNA

[0172] This example illustrates the construction of plasmids for transferring recombinant DNA into the nucleus of a plant cell which can be regenerated into a transgenic crop plant of this invention. Primers for PCR amplification of protein coding nucleotides of recombinant DNA are designed at or near the start and stop codons of the coding sequence, in order to eliminate most of the 5′ and 3′ untranslated regions. DNA of interest, i.e. each DNA identified in Table 2 and the DNA for the identified homologous genes, are cloned and amplified by PCR prior to insertion into the insertion site the base vector.

[0173] A. Plant Expression Constructs for Corn Transformation

[0174] Elements of an exemplary common expression vector, pMON93039 are illustrated in Table 20. The exemplary base vector which is especially useful for corn transformation is illustrated in FIG. 2 and assembled using technology known in the art.

TABLE 20
pMON93039

| | | | Coordinates of |
|---|---|---|---|
| | | | SEQ ID NO: |
| function | name | annotation | 4816 |
| Agrobacterium | B-AGRtu.right border | Agro right border | 11364-11720 |
| T-DNA | | sequence, essential for | |
| trabsfer | | transfer of T-DNA. | |
| Gene of | E-Os.Act1 | upstream promoter | 19-775 |
| interest | | region of the rice actin | |
| expression | | 1 gene | |
| cassette | E-CaMV.35S.2xA1-B3 | duplicated35S A1-B3 | 788-1120 |
| | | domain without TATA | |
| | | box | |
| | P-Os.Act1 | promoter region of the | 1125-1204 |
| | | rice actin 1 gene | |
| | L-Ta.Lhcb1 | 5′ untranslated leader | 1210-1270 |
| | | of wheat major | |
| | | chlorophyll a/b binding | |
| | | protein | |
| | I-Os.Act1 | first intron and flanking | 1287-1766 |
| | | UTR exon sequences | |
| | | from the rice actin 1 | |
| | | gene | |
| | T-St.Pis4 | 3′ non-translated region | 1838-2780 |
| | | of the potato proteinase | |
| | | inhibitor II gene which | |
| | | functions to direct | |
| | | polyadenylation of the | |
| | | mRNA | |
| Plant | P-Os.Act1 | Promoter from the rice | 2830-3670 |
| selectable | | actin 1 gene | |
| marker | L-Os.Act1 | first exon of the rice | 3671-3750 |
| expression | | actin 1 gene | |
| cassette | I-Os.Act1 | first intron and flanking | 3751-4228 |
| | | UTR exon sequences | |
| | | from the rice actin 1 | |
| | | gene | |
| | TS-At.ShkG-CTP2 | Transit peptide region | 4238-4465 |
| | | of Arabidopsis EPSPS | |
| | CR-AGRtu.aroA- | coding region for | 4466-5833 |
| | CP4.nat | bacterial strain CP4 | |
| | | native arogA gene | |
| | T-AGRtu.nos | A 3′ non-translated | 5849-6101 |
| | | region of the nopaline | |
| | | synthase gene of | |
| | | Agrobacterium | |
| | | tumefaciens Ti plasmid | |
| | | which functions to | |
| | | direct polyadenylation | |
| | | of the mRNA. | |
| Agrobacterium | B-AGRtu.left border | Agro left border | 6168-6609 |
| T-DNA | | sequence, essential for | |
| transfer | | transfer of T-DNA. | |
| Maintenance | OR-Ec.oriV-RK2 | The vegetative origin | 6696-7092 |
| in E. coli | | of replication from | |
| | | plasmid RK2. | |
| | CR-Ec.rop | Coding region for | 8601-8792 |
| | | repressor of primer | |
| | | from the ColE1 | |
| | | plasmid. Expression of | |
| | | this gene product | |
| | | interferes with primer | |
| | | binding at the origin of | |
| | | replication, keeping | |
| | | plasmid copy number | |
| | | low. | |
| | OR-Ec.ori-ColE1 | The minimal origin of | 9220-9808 |
| | | replication from the E. coli | |
| | | plasmid ColE1. | |
| | P-Ec.aadA-SPC/STR | romoter for Tn7 | 10339-10380 |
| | | adenylyltransferase | |
| | | (AAD(3″)) | |
| | CR-Ec.aadA-SPC/STR | Coding region for Tn7 | 10381-11169 |
| | | adenylyltransferase | |
| | | (AAD(3″)) conferring | |
| | | spectinomycin and | |
| | | streptomycin | |
| | | resistance. | |
| | T-Ec.aadA-SPC/STR | 3′ UTR from the Tn7 | 11170-11227 |
| | | adenylyltransferase | |
| | | (AAD(3″)) gene of E. coli. | |

[0175] B. Plant Expression Constructs for Soybean or Canola Transformation

[0176] Plasmids for use in transformation of soybean are also prepared. Elements of an exemplary common expression vector plasmid pMON82053 are shown in Table 21 below. This exemplary soybean transformation base vector illustrated in FIG. 2 is assembled using the technology known in the art. DNA of interest, i.e. each DNA identified in Table 2 and the DNA for the identified homologous genes, is cloned and amplified by PCR prior to insertion into the insertion site the base vector at the insertion site between the enhanced 35S CaMV promoter and the termination sequence of cotton E6 gene.

TABLE 21
pMON82053

| | | | Coordinates of |
|---|---|---|---|
| | | | SEQ ID NO: |
| function | name | annotation | 4817 |
| Agrobacterium | B-AGRtu.left | Agro left border sequence, essential | 6144-6585 |
| T-DNA | border | for transfer of T-DNA. | |
| transfer | | | |
| Plant | P-At.Act7 | Promoter from the arabidopsis actin | 6624-7861 |
| selectable | | 7 gene | |
| marker | L-At.Act7 | 5′UTR of Arabidopsis Act7 gene | |
| expression | I-At.Act7 | Intron from the Arabidopsis actin7 | |
| cassette | | gene | |
| | TS-At.ShkG- | Transit peptide region of Arabidopsis | 7864-8091 |
| | CTP2 | EPSPS | |
| | CR-AGRtu.aroA- | Synthetic CP4 coding region with | 8092-9459 |
| | CP4.nno_At | dicot preferred codon usage. | |
| | T-AGRtu.nos | A 3′ non-translated region of the | 9466-9718 |
| | | nopaline synthase gene of | |
| | | Agrobacterium tumefaciens Ti | |
| | | plasmid which functions to direct | |
| | | polyadenylation of the mRNA. | |
| Gene of | P-CaMV.35S-enh | Promoter for 35S RNA from CaMV | 1-613 |
| interest | | containing a duplication of the −90 to | |
| expression | | −350 region. | |
| cassette | T-Gb.E6-3b | 3′ untranslated region from the fiber | 688-1002 |
| | | protein E6 gene of sea-island cotton; | |
| Agrobaterium | B-AGRtu.right | Agro right border sequence, essential | 1033-1389 |
| T-DNA | border | for transfer of T-DNA. | |
| transfer | | | |
| Maintenance | OR-Ec.oriV-RK2 | The vegetative origin of replication | 5661-6057 |
| in E. coli | | from plasmid RK2. | |
| | CR-Ec.rop | Coding region for repressor of | 3961-4152 |
| | | primer from the ColE1 plasmid. | |
| | | Expression of this gene product | |
| | | interferes with primer binding at the | |
| | | origin of replication, keeping | |
| | | plasmid copy number low. | |
| | OR-Ec.ori-ColE1 | The minimal origin of replication | 2945-3533 |
| | | from the E. coli plasmid ColE1. | |
| | P-Ec.aadA- | romoter for Tn7 adenylyltransferase | 2373-2414 |
| | SPC/STR | (AAD(3″)) | |
| | CR-Ec.aadA- | Coding region for Tn7 | 1584-2372 |
| | SPC/STR | adenylyltransferase (AAD(3″)) | |
| | | conferring spectinomycin and | |
| | | streptomycin resistance. | |
| | T-Ec.aadA- | 3′ UTR from the Tn7 | 1526-1583 |
| | SPC/STR | adenylyltransferase (AAD(3″)) gene | |
| | | of E. coli. | |

[0177] C. Plant Expression Constructs for Cotton Transformation

[0178] Plasmids for use in transformation of cotton are also prepared. Elements of an exemplary common expression vector plasmid pMON99053 are shown in Table 22 below and FIG. 3. Primers for PCR amplification of protein coding nucleotides of recombinant DNA are designed at or near the start and stop codons of the coding sequence, in order to eliminate most of the 5′ and 3′ untranslated regions. Each recombinant DNA coding for a protein identified in Table 2 is amplified by PCR prior to insertion into the insertion site within the gene of interest expression cassette of one of the base.

TABLE 22
pMON99053

| | | | Coordinates |
|---|---|---|---|
| | | | of SEQ ID |
| function | name | annotation | NO: 4818 |
| Agrobacterium | B-AGRtu.right | Agro right border sequence, | 1-357 |
| T-DNA transfer | border | essential for transfer of T- | |
| | | DNA. | |
| Gene of interest | Exp-CaMV.35S- | Enhanced version of the 35S | 388-1091 |
| expression cassette | enh + ph.DnaK | RNA promoter from CaMV | |
| | | plus the petunia hsp70 5′ | |
| | | untranslated region | |
| | T-Ps.RbcS2-E9 | The 3′ non-translated region of | 1165-1797 |
| | | the pea RbcS2 gene which | |
| | | functions to direct | |
| | | polyadenylation of the mRNA. | |
| Plant selectable | Exp-CaMV.35S | Promoter and 5′ untranslated | 1828-2151 |
| marker expression | | region of the 35S RNA from | |
| cassette | | CaMV | |
| | CR-Ec.nptII-Tn5 | Neomycin Phosphotransferase | 2185-2979 |
| | | II gene that confers resistance | |
| | | to neomycin and kanamycin | |
| | T-AGRtu.nos | A 3′ non-translated region of | 3011-3263 |
| | | the nopaline synthase gene of | |
| | | Agrobacterium tumefaciens Ti | |
| | | plasmid which functions to | |
| | | direct polyadenylation of the | |
| | | mRNA. | |
| Agrobacterium | B-AGRtu.left | Agro left border sequence, | 3309-3750 |
| T-DNA transfer | border | essential for transfer of T- | |
| | | DNA. | |
| Maintenance in E. coli | OR-Ec.oriV- | The vegetative origin of | 3837-4233 |
| | RK2 | replication from plasmid RK2. | |
| | CR-Ec.rop | Coding region for repressor of | 5742-5933 |
| | | primer from the ColE1 | |
| | | plasmid. Expression of this | |
| | | gene product interferes with | |
| | | primer binding at the origin of | |
| | | replication, keeping plasmid | |
| | | copy number low. | |
| | OR-Ec.ori- | The minimal origin of | 6361-6949 |
| | ColE1 | replication from the E. coli | |
| | | plasmid ColE1. | |
| | P-Ec.aadA- | romoter for Tn7 | 7480-7521 |
| | SPC/STR | adenylyltransferase (AAD(3″)) | |
| | CR-Ec.aadA- | Coding region for Tn7 | 7522-8310 |
| | SPC/STR | adenylyltransferase (AAD(3″)) | |
| | | conferring spectinomycin and | |
| | | streptomycin resistance. | |
| | T-Ec.aadA- | 3′ UTR from the Tn7 | 8311-8368 |
| | SPC/STR | adenylyltransferase (AAD(3″)) | |
| | | gene of E. coli. | |

### Example 6

### Corn Plant Transformation

[0179] This example illustrates the production and identification of transgenic corn cells in seed of transgenic corn plants having an enhanced agronomic trait, i.e. enhanced nitrogen use efficiency, increased yield, enhanced water use efficiency, enhanced tolerance to cold and/or enhanced seed compositions as compared to control plants. Transgenic corn cells are prepared with recombinant DNA expressing each of the protein encoding DNAs listed in Table 2 by Agrobacterium-mediated transformation using the corn transformation constructs as disclosed in Example 5.

[0180] Corn transformation is effected using methods disclosed in U.S. Patent Application Publication 2004/0344075 A1 where corn embryos are inoculated and co-cultured with the Agrobacterium tumefaciens strain ABI and the corn transformation vector. To regenerate transgenic corn plants the transgenic callus resulting from transformation is placed on media to initiate shoot development in plantlets which are transferred to potting soil for initial growth in a growth chamber followed by a mist bench before transplanting to pots where plants are grown to maturity. The plants are self fertilized and seed is harvested for screening as seed, seedlings or progeny R2 plants or hybrids, e.g., for yield trials in the screens indicated above.

[0181] Many transgenic events which survive to fertile transgenic plants that produce seeds and progeny plants do not exhibit an enhanced agronomic trait. The transgenic plants and seeds having the transgenic cells of this invention which have recombinant DNA imparting the enhanced agronomic traits are identified by screening for nitrogen use efficiency, yield, water use efficiency, cold tolerance and enhanced seed composition.

### Example 7

### Soybean Plant Transformation

[0182] This example illustrates the production and identification of transgenic soybean cells in seed of transgenic soybean plants having an enhanced agronomic trait, i.e. enhanced nitrogen use efficiency, increased yield, enhanced water use efficiency, enhanced tolerance to cold and/or enhanced seed compositions as compared to control plants. Transgenic soybean cells are prepared with recombinant DNA expressing each of the protein encoding DNAs listed in Table 1 by Agrobacterium-mediated transformation using the soybean transformation constructs disclosed in Example 5. Soybean transformation is effected using methods disclosed in U.S. Pat. No. 6,384,301 where soybean meristem explants are wounded then inoculated and co-cultured with the soybean transformation vector, then transferred to selection media for 6-8 weeks to allow selection and growth of transgenic shoots.

[0183] The transformation is repeated for each of the protein encoding DNAs identified in Table 2.

[0184] Transgenic shoots producing roots are transferred to the greenhouse and potted in soil. Many transgenic events which survive to fertile transgenic plants that produce seeds and progeny plants do not exhibit an enhanced agronomic trait. The transgenic plants and seeds having the transgenic cells of this invention which have recombinant DNA imparting the enhanced agronomic traits are identified by screening for nitrogen use efficiency, yield, water use efficiency, cold tolerance and enhanced seed composition.

### Example 8

### Selection of Transgenic Plants with Enhanced Agronomic Trait(s)

[0185] This example illustrates identification of nuclei of the invention by screening derived plants and seeds for an enhanced trait identified below.

[0186] Many transgenic events which survive to fertile transgenic plants that produce seeds and progeny plants will not exhibit an enhanced agronomic trait. Populations of transgenic seed and plants prepared in Examples 6 and 7 are screened to identify those transgenic events providing transgenic plant cells with a nucleus having recombinant DNA imparting an enhanced trait. Each population is screened for enhanced nitrogen use efficiency, increased yield, enhanced water use efficiency, enhanced tolerance to cold and heat, increased level of oil and protein in seed using assays described below. Plant cell nuclei having recombinant DNA with each of the genes identified in Table 2 and the identified homologs are identified in plants and seeds with at least one of the enhanced traits.

### A. Selection for Enhanced Nitrogen Use Efficiency

[0187] Transgenic corn plants with nuclei of the invention are planted in fields with three levels of nitrogen (N) fertilizer being applied, i.e. low level (0 pounds per acre N), medium level (80 pounds per acre N) and high level (180 pounds per acre N). Liquid 28% or 32% UAN (Urea, Ammonium Nitrogen) are used as the N source and apply by broadcast boom and incorporate with a field cultivator with rear rolling basket in the same direction as intended crop rows. Although there is no N applied in the low level treatment, the soil should still be disturbed in the same fashion as the treated area. Transgenic plants and control plants can be grouped by genotype and construct with controls arranged randomly within genotype blocks. For improved statistical analysis each type of transgenic plant can be tested by 3 replications and across 4 locations. Nitrogen levels in the fields are analyzed before planting by collecting sample soil cores from 0-24″ and 24 to 48″ soil layer. Soil samples are analyzed for nitrate-nitrogen, phosphorus (P), potassium (K), organic matter and pH to provide baseline values. P, K and micronutrients are applied based upon soil test recommendations.

[0188] Transgenic corn plants prepared in Example 6 and which exhibit a 2 to 5% yield increase as compared to control plants when grown in the high nitrogen field are selected as having nuclei of the invention. Transgenic corn plants which have at least the same or higher yield as compared to control plants when grown in the medium nitrogen field are selected as having nuclei of the invention. Transgenic corn plants having a nucleus with DNA identified in Table 3 as imparting nitrogen use efficiency (LN) and homologous DNA are selected from a nitrogen use efficiency screen as having a nucleus of this invention.

### B. Selection for Increased Yield

[0189] Many transgenic plants of this invention exhibit increased yield as compared to a control plant. Increased yield can result from enhanced seed sink potential, i.e. the number and size of endosperm cells or kernels and/or enhanced sink strength, i.e. the rate of starch biosynthesis. Sink potential can be established very early during kernel development, as endosperm cell number and size are determined within the first few days after pollination.

[0190] Much of the increase in corn yield of the past several decades has resulted from an increase in planting density. During that period, corn yield has been increasing at a rate of 2.1 bushels/acre/year, but the planting density has increased at a rate of 250 plants/acre/year. A characteristic of modern hybrid corn is the ability of these varieties to be planted at high density. Many studies have shown that a higher than current planting density should result in more biomass production, but current germplasm does not perform. well at these higher densities. One approach to increasing yield is to increase harvest index (HI), the proportion of biomass that is allocated to the kernel compared to total biomass, in high density plantings.

[0191] Effective yield selection of enhanced yielding transgenic corn events uses hybrid progeny of the transgenic event over multiple locations with plants grown under optimal production management practices, and maximum pest control. A useful target for increased yield is a 5% to 10% increase in yield as compared to yield produced by plants grown from seed for a control plant. Selection methods can be applied in multiple and diverse geographic locations, for example up to 16 or more locations, over one or more planting seasons, for example at least two planting seasons to statistically distinguish yield improvement from natural environmental effects. Each of the transgenic corn plants and soybean plants with a nucleus of the invention prepared in Examples 6 and 7 are screened for yield enhancement. At least one event from each of the corn plants is selected as having at least between 3 and 5% increase in yield as compared to a control plant as having a nucleus of this invention.

### C. Selection for Enhanced Water Use Efficiency (WUE)

[0192] The following is a high-throughput method for screening for water use efficiency in a greenhouse to identify the transgenic corn plants with a nucleus of this invention. This selection process imposes 3 drought/re-water cycles on plants over a total period of 15 days after an initial stress free growth period of 11 days. Each cycle consists of 5 days, with no water being applied for the first four days and a water quenching on the 5th day of the cycle. The primary phenotypes analyzed by the selection method are the changes in plant growth rate as determined by height and biomass during a vegetative drought treatment. The hydration status of the shoot tissues following the drought is also measured. The plant heights are measured at three time points. The first is taken just prior to the onset drought when the plant is 11 days old, which is the shoot initial height (SIH). The plant height is also measured halfway throughout the drought/re-water regimen, on day 18 after planting, to give rise to the shoot mid-drought height (SMH). Upon the completion of the final drought cycle on day 26 after planting, the shoot portion of the plant is harvested and measured for a final height, which is the shoot wilt height (SWH) and also measured for shoot wilted biomass (SWM). The shoot is placed in water at 40 degree Celsius in the dark. Three days later, the shoot is weighted to give rise to the shoot turgid weight (STM). After drying in an oven for four days, the shoots are weighted for shoot dry biomass (SDM). The shoot average height (SAH) is the mean plant height across the 3 height measurements. The procedure described above can be adjusted for +/−˜one day for each step given the situation.

[0193] To correct for slight differences between plants, a size corrected growth value is derived from SIH and SWH. This is the Relative Growth Rate (RGR). Relative Growth Rate (RGR) is calculated for each shoot using the formula [RGR %=(SWH−SIH)/((SWH+SIH)/2)×100]. Relative water content (RWC) is a measurement of how much (%) of the plant was water at harvest. Water Content (RWC) is calculated for each shoot using the formula [RWC %=(SWM−SDM)/(STM−SDM)×100]. Fully watered corn plants of this age run around 98% RWC.

[0194] Transgenic corn plants and soybean plants prepared in Examples 6 and 7 are screened for water use efficiency. Transgenic plants having at least a 1% increase in RGR and RWC as compared to control plants are identified as having enhanced water used efficiency and are selected as having a nucleus of this invention. Transgenic corn and soybean plants having in their nucleus DNA identified in Table 3 as imparting drought tolerance enhancement (DS, HS, SS, and PEG) and homologous DNA are identified as showing increased water use efficiency as compared to control plants and are selected as having a nucleus of this invention.

### D. Selection for Growth Under Cold Stress

[0195] Cold germination assay—Three sets of seeds are used for the assay. The first set consists of positive transgenic events (F1 hybrid) where the genes of the present invention are expressed in the seed. The second seed set is nontransgenic, wild-type negative control made from the same genotype as the transgenic events. The third set consisted of two cold tolerant and one cold sensitive commercial check lines of corn. All seeds are treated with a fungicide “Captan” (MAESTRO® 80DF Fungicide, Arvesta Corporation, San Francisco, Calif., USA). 0.43 mL Captan is applied per 45 g of corn seeds by mixing it well and drying the fungicide prior to the demonstration.

[0196] Corn kernels are placed embryo side down on blotter paper within an individual cell (8.9×8.9 cm) of a germination tray (54×36 cm). Ten seeds from an event are placed into one cell of the germination tray. Each tray can hold 21 transgenic events and 3 replicates of wildtype (LH244SDms+LR59), which is randomized in a complete block design. For every event there are five replications (five trays). The trays are placed at 9.7C for 24 days (no light) in a Convrion® growth chamber (Conviron Model PGV36, Controlled Environments, Winnipeg, Canada). Two hundred and fifty milliliters of deionized water are added to each germination tray. Germination counts are taken 10th, 11th, 12th, 13th, 14th, 17th, 19th, 21st, and 24th day after start date of the demonstration. Seeds are considered germinated if the emerged radicle size is 1 cm. From the germination counts germination index is calculated.

[0197] The germination index is calculated as per:

Germination index=(Σ([T+1−nᵢ]*[Pᵢ−Pᵢ₋₁]))/T

where T is the total number of days for which the germination assay is performed. The number of days after planting is defined by n. “i” indicated the number of times the germination had been counted, including the current day. P is the percentage of seeds germinated during any given rating. Statistical differences are calculated between transgenic events and wild type control. After statistical analysis, the events that show a statistical significance at the p level of less than 0.1 relative to wild-type controls will advance to a secondary cold selection. The secondary cold screen is conducted in the same manner of the primary selection only increasing the number of repetitions to ten. Statistical analysis of the data from the secondary selection is conducted to identify the events that show a statistical significance at the p level of less than 0.05 relative to wild-type controls.

[0198] Transgenic corn plants and soybean plants prepared in Examples 6 and 7 are screened for water use efficiency. Transgenic plants having at least a 5% increase in germination index as compared to control plants are identified as having enhanced cold stress tolerance and are selected as having a nucleus of this invention. Transgenic corn and soybean plants having in their nucleus DNA identified in Table 3 as imparting cold tolerance enhancement (CK or CS) and homologous DNA are identified as showing increased cold stress tolerance as compared to control plants and are selected as having a nucleus of this invention.

E. Screens for Transgenic Plant Seeds with Increased Protein and/or Oil Levels

[0199] The following is a high-throughput selection method for identifying plant seeds with improvement in seed composition using the Infratec® 1200 series Grain Analyzer, which is a near-infrared transmittance spectrometer used to determine the composition of a bulk seed sample. Near infrared analysis is a non-destructive, high-throughput method that can analyze multiple traits in a single sample scan. An NIR calibration for the analytes of interest is used to predict the values of an unknown sample. The NIR spectrum is obtained for the sample and compared to the calibration using a complex chemometric software package that provides a predicted values as well as information on how well the sample fits in the calibration.

[0200] Infratec® Model 1221, 1225, or 1227 analyzer with transport module by Foss North America is used with cuvette, item # 1000-4033, Foss North America or for small samples with small cell cuvette, Foss standard cuvette modified by Leon Girard Co. Corn and soy check samples of varying composition maintained in check cell cuvettes are supplied by Leon Girard Co. NIT collection software is provided by Maximum Consulting Inc. Calculations are performed automatically by the software. Seed samples are received in packets or containers with barcode labels from the customer. The seed is poured into the cuvettes and analyzed as received.

TABLE 23

| Typical sample(s): | Whole grain corn and soybean seeds |
|---|---|
| Analytical time to run | Less than 0.75 min per sample |
| method: | |
| Total elapsed time per | 1.5 minute per sample |
| run: | |
| Typical and minimum | Corn typical: 50 cc; minimum 30 cc |
| sample size: | Soybean typical: 50 cc; minimum 5 cc |
| Typical analytical range: | Determined in part by the specific calibration. |
| | Corn - moisture 5-15%, oil 5-20%, |
| | protein 5-30%, starch 50-75%, and |
| | density 1.0-1.3%. |
| | Soybean - moisture 5-15%, oil 15-25%, and |
| | protein 35-50%. |

Transgenic corn plants and soybean plants prepared in Examples 6 and 7 are screened for increased protein and oil in seed. Transgenic inbred corn and soybean plants having an increase of at least 1 percentage point in the total percent seed protein or at least 0.3 percentage point in total seed oil and transgenic hybrid corn plants having an increase of at least 0.4 percentage point in the total percent seed protein as compared to control plants are identified as having enhanced seed protein or enhanced seed oil and are selected as having a nucleus of this invention.

### Example 9

### Cotton Transgenic Plants with Enhanced Agronomic Traits

[0201] Cotton transformation is performed as generally described in WO0036911 and in U.S. Pat. No. 5,846,797. Transgenic cotton plants containing each of the recombinant DNA having a sequence of SEQ ID NO: 1 through SEQ ID NO: 114 are obtained by transforming with recombinant DNA from each of the genes identified in Table 1. Progeny transgenic plants are selected from a population of transgenic cotton events under specified growing conditions and are compared with control cotton plants. Control cotton plants are substantially the same cotton genotype but without the recombinant DNA, for example, either a parental cotton plant of the same genotype that was not transformed with the identical recombinant DNA or a negative isoline of the transformed plant. Additionally, a commercial cotton cultivar adapted to the geographical region and cultivation conditions, i.e. cotton variety ST474, cotton variety FM 958, and cotton variety Siokra L-23, are used to compare the relative performance of the transgenic cotton plants containing the recombinant DNA. The specified culture conditions are growing a first set of transgenic and control plants under “wet” conditions, i.e. irrigated in the range of 85 to 100 percent of evapotranspiration to provide leaf water potential of −14 to −18 bars, and growing a second set of transgenic and control plants under “dry” conditions, i.e. irrigated in the range of 40 to 60 percent of evapotranspiration to provide a leaf water potential of −21 to −25 bars. Pest control, such as weed and insect control is applied equally to both wet and dry treatments as needed. Data gathered during the trial includes weather records throughout the growing season including detailed records of rainfall; soil characterization information; any herbicide or insecticide applications; any gross agronomic differences observed such as leaf morphology, branching habit, leaf color, time to flowering, and fruiting pattern; plant height at various points during the trial; stand density; node and fruit number including node above white flower and node above crack boll measurements; and visual wilt scoring. Cotton boll samples are taken and analyzed for lint fraction and fiber quality. The cotton is harvested at the normal harvest timeframe for the trial area. Enhanced water use efficiency is indicated by increased yield, improved relative water content, enhanced leaf water potential, increased biomass, enhanced leaf extension rates, and improved fiber parameters.

[0202] The transgenic cotton plants of this invention are identified from among the transgenic cotton plants by agronomic trait screening as having increased yield and enhanced water use efficiency.

### Example 10

### Canola Plants with Enhanced Agrominic Traits

[0203] This example illustrates plant transformation useful in producing the transgenic canola plants of this invention and the production and identification of transgenic seed for transgenic canola having enhanced water use efficiency, enhanced cold tolerance, increased yield, enhanced nitrogen use efficiency, enhanced seed protein and enhanced seed oil.

[0204] Tissues from in vitro grown canola seedlings are prepared and inoculated with a suspension of overnight grown Agrobacterium containing plasmid DNA with the gene of interest cassette and a plant selectable marker cassette. Following co-cultivation with Agrobacterium, the infected tissues are allowed to grow on selection to promote growth of transgenic shoots, followed by growth of roots from the transgenic shoots. The selected plantlets are then transferred to the greenhouse and potted in soil. Molecular characterizations are performed to confirm the presence of the gene of interest, and its expression in transgenic plants and progenies. Progeny transgenic plants are selected from a population of transgenic canola events under specified growing conditions and are compared with control canola plants. Control canola plants are substantially the same canola genotype but without the recombinant DNA, for example, either a parental canola plant of the same genotype that is not transformed with the identical recombinant DNA or a negative isoline of the transformed plant

[0205] Transgenic canola plant cells are transformed with recombinant DNA from each of the genes identified in Table 2. Transgenic progeny plants and seed of the transformed plant cells are screened for enhanced water use efficiency, enhanced cold tolerance, increased yield, enhanced nitrogen use efficiency, enhanced seed protein and enhanced seed oil.

### Example 11

### Monocot and Dicot Plant Transformation for the Suppression of Endogeneous Protein

[0206] This example illustrates monocot and dicot plant transformation to produce nuclei of this invention in cells of a transgenic plant by transformation where the recombinant DNA suppresses the expression of an endogenous protein identified in Table 24.

[0207] Corn callus and soybean tissue are transformed as describe in Examples 6 and 7 using recombinant DNA in the nucleus with DNA that transcribes to RNA that forms double-stranded RNA targeted to an endogenous gene with DNA encoding the protein. The genes for which the double-stranded RNAs are targeted are the native gene in corn and soybean that are homolog of the genes encoding the protein of Arabidopsis thaliana as identified in table 24.

[0208] Populations of transgenic plants prepared in Examples 6, 7 or 10 with DNA for suppressing a gene identified in Table 3 as providing an enhanced trait by gene suppression are screened to identify an event from those plants with a nucleus of the invention by selecting the trait identified in this specification.

TABLE 24

| PEP SEQ | | Construct | | |
|---|---|---|---|---|
| ID | Pfam module | ID | Traits | |
| 115 | AP2 | 10177 | LN | |
| 116 | zf-C2H2 | 12155 | CS | SS |
| 118 | F-box::Tub | 11873 | LN | PEG |
| 154 | Pex2_Pex12::zf-C3HC4 | 11113 | CS | |
| 188 | Myb_DNA-binding::Myb_DNA- | 12325 | LN | |
| | binding | | | |
| 200 | bZIP_1 | 71228 | CK | |

What is claimed is:

1. A plant cell nucleus with stably-integrated, recombinant DNA comprising a promoter that is functional in plant cells and that is operably linked to protein coding DNA encoding a protein having an amino acid sequence comprising a Pfam domain module zf-CCCH::KH_{—}1::zf-CCCH;
wherein said plant cell nucleus is selected by screening a population of transgenic plants that have said recombinant DNA in its nuclei and express said protein for an enhanced trait as compared to control plants that do not have said recombinant DNA in their nuclei; and
wherein said enhanced trait is selected from group of enhanced traits consisting of enhanced water use efficiency, enhanced cold tolerance, increased yield, enhanced nitrogen use efficiency, enhanced seed protein and enhanced seed oil.

2. A plant cell nucleus with stably integrated, recombinant DNA, wherein
a. said recombinant DNA comprises a promoter that is functional in said plant cell and that is operably linked to a protein coding DNA encoding a protein having an amino acid sequence comprising a Pfam domain module selected from the group consisting of AP2, zf-C2H2, PLATZ, F-box::Tub, zf-C3HC4::YDG_SRA::zf-C3HC4, SBP, HLH, AP2, zf-B_box::zf-B_box, zf-C3HC4, AP2, HMG_box::HMG_box::HMG_box, zf-C3HC4, zf-C2H2, GATA, HLH, AP2, NAM, zf-Dof, WRKY, AP2, HMG_box, zf-CCCH::KH_{—}1::zf-CCCH, SRF-TF, WRKY, zf-C3HC4, zf-Dof, zf-Dof, AP2, AP2, DUF248, zf-C2H2, SRF-TF::K-box, zf-Dof, zf-C2H2, Myb_DNA-binding::Myb_DNA-binding, Myb_DNA-binding::Myb_DNA-binding::Myb_DNA-binding, SRF-TF, Pex2_Pex 12::zf-C3HC4, bZIP_{—}2, HLH, GRAS, Myb_DNA-binding, GRAS, F-box, GRAS, WRKY, AT_hook::DUF296, GRAS, Myb_DNA-binding::Myb_DNA-binding, Myb_DNA-binding::Myb_DNA-binding, HL H, zf-C2H2, NAM, zf-B_box::zf-B_box, Myb_DNA-binding, NAM, PHD, SRF-TF::K-box, zf-C3HC4, HLH, SRF-TF::K-box, Myb_DNA-binding, WRKY, SRF-TF::K-box, Myb_DNA-binding, Myb_DNA-binding::Linker_histone, Myb_DNA-binding::Myb_DNA-binding, Myb_DNA-binding::Myb_DNA-binding, bZIP_{—}1, Myb_DNA-binding::Myb_DNA-binding, SRF-TF::K-box, SRF-TF::K-box, CBFD_NFYB_HMF, AUX_IAA, Myb_DNA-binding::Myb_{—}DNA-binding, LIM::LIM, IBR, SET, bZIP_{—}1, Mov34, ZZ::Myb_DNA-binding::SWIRM, bZIP_{—}1, E2F_TDP::E2F_TDP, Myb_DNA-binding, Prefoldin, NAM, HD-ZIP_N::Homeobox::HALZ, Myb_DNA-binding::Myb_DNA-binding, AP2, GATA, zf-C3HC4, SRF-TF::K-box, bZIP_{—}1, TCP, zf-C3HC4, Ank::Ank::zf-CCCH::zf-CCCH, Myb_DNA-binding::Myb_DNA-binding, TCP, AP2, ZZ, zf-C2H2::zf-C2H2, AP2, SRF-TF::K-box, B3, zf-LSD1::zf-LSD1, and HLH;
b. said recombinant DNA comprises a promoter that is functional in said plant cell and that is operably linked to a protein coding DNA encoding a protein comprising an amino acid sequence with at least 90% identity to a consensus amino acid sequence selected from the group consisting of SEQ ID NO: 4819 through 4825; or
c. said recombinant DNA suppresses comprises a promoter that is functional in said plant cell and operably linked to DNA that transcribe into RNA that suppresses the level of an endogenous protein wherein said endogenous protein has an amino acid sequence comprising a pfam domain module selected from the group consisting of AP2, zf-C2H2, F-box::Tub, Pex2_Pex12::zf-C3HC4, Myb_DNA-binding::Myb_DNA-binding, and bZIP_{—}1; and wherein said plant cell nucleus is selected by screening a population of transgenic plants that have said recombinant DNA and an enhanced trait as compared to control plants that do not have said recombinant DNA in their nuclei; and wherein said enhanced trait is selected from group of enhanced traits consisting of enhanced water use efficiency, enhanced cold tolerance, enhanced heat tolerance, enhanced resistance to salt exposure, enhanced shade tolerance, increased yield, enhanced nitrogen use efficiency, enhanced seed protein and enhanced seed oil.

3. The plant cell nucleus of claim 2 wherein said protein coding DNA encodes a protein having an amino acid sequence selected from the group consisting of SEQ ID NO: 115 through SEQ ID NO: 4815.

4. The plant cell nucleus of claim 2 further comprising DNA expressing a protein that provides tolerance from exposure to an herbicide applied at levels that are lethal to a wild type of said plant cell.

5. The plant cell nucleus of claim 4 wherein said herbicide is a glyphosate, dicamba, or glufosinate compound.

6. A transgenic plant cell or plant comprising a plurality of plant cells with the plant cell nucleus of claim 2.

7. The transgenic plant cell or plant of claim 6 which is homozygous for said recombinant DNA.

8. A transgenic seed comprising a plurality of plant cells with a plant cell nucleus of claim 2.

9. The transgenic seed of claim 8 from a corn, soybean, cotton, canola, alfalfa, wheat or rice plant.

10. A transgenic pollen grain comprising a haploid derivative of a plant cell nucleus of claim 2.

11. A method for manufacturing non-natural, transgenic seed that can be used to produce a crop of transgenic plants with an enhanced trait resulting from expression of recombinant DNA in a nucleus of claim 2, wherein said method for manufacturing said transgenic seed comprising:
(a) screening a population of plants for said enhanced trait and said recombinant DNA, wherein individual plants in said population can exhibit said trait at a level less than, essentially the same as or greater than the level that said trait is exhibited in control plants which do not contain the recombinant DNA, wherein said enhanced trait is selected from the group of enhanced traits consisting of enhanced water use efficiency, enhanced cold tolerance, enhanced heat tolerance, enhanced high salinity tolerance, enhanced shade tolerance, increased yield, enhanced nitrogen use efficiency, enhanced seed protein and enhanced seed oil,
(b) selecting from said population one or more plants that exhibit said trait at a level greater than the level that said trait is exhibited in control plants, and
(c) collecting seeds from selected plant selected from step b.

12. The method of claim 11 wherein said method for manufacturing said transgenic seed further comprising
(a) verifying that said recombinant DNA is stably integrated in said selected plants, and
(b) analyzing tissue of said selected plant to determine the expression or suppression of a protein having the function of a protein having an amino acid sequence selected from the group consisting of SEQ ID NO:115-228.

13. The method of claim 11 wherein said seed is corn, soybean, cotton, alfalfa, canola wheat or rice seed.

14. A method of producing hybrid corn seed comprising:
(a) acquiring hybrid corn seed from a herbicide tolerant corn plant which also has stably-integrated, recombinant DNA in a nucleus of claim 2;
(b) producing corn plants from said hybrid corn seed, wherein a fraction of the plants produced from said hybrid corn seed is homozygous for said recombinant DNA, a fraction of the plants produced from said hybrid corn seed is hemizygous for said recombinant DNA, and a fraction of the plants produced from said hybrid corn seed has none of said recombinant DNA;
(c) selecting corn plants which are homozygous and hemizygous for said recombinant DNA by treating with an herbicide;
(d) collecting seed from herbicide-treated-surviving corn plants and planting said seed to produce further progeny corn plants;
(e) repeating steps (c) and (d) at least once to produce an inbred corn line; and
(f) crossing said inbred corn line with a second corn line to produce hybrid seed.

The application's sequence listing, which the Patent Office published only in electronic form, follows.

SEQUENCE LISTING (4825 sequences)

SEQ ID NO: 1 - DNA, 657 bp, Arabidopsis thaliana
atggatccatttttaattcagtccccattctccggcttctcaccggaatattctatcggatcttctccagattctttctcatcctcttcttctaacaattactctcttcccttcaacgagaacgactcagaggaaatgtttctctacggtctaatcgagcagtccacgcaacaaacctatattgactcggatagtcaagaccttccgatcaaatccgtaagctcaagaaagtcagagaagtcttacagaggcgtaagacgacggccatgggggaaattcgcggcggagataagagattcgactagaaacggtattagggtttggctcgggacgttcgaaagcgcggaagaggcggctttagcctacgatcaagctgctttctcgatgagagggtcctcggcgattctcaatttttcggcggagagagttcaagagtcgctttcggagattaaatatacctacgaggatggttgttctccggttgtggcgttgaagaggaaacactcgatgagacggagaatgaccaataagaagacgaaagatagtgactttgatcaccgctccgtgaagttagataatgtagttgtctttgaggatttgggagaacagtaccttgaggagcttttggggtcttctgaaaatagtgggacttggtga

SEQ ID NO: 2 - DNA, 1122 bp, Arabidopsis thaliana
atggcggctcgaaaactagggtcgttgttacgtcaatactttttctctctatgcttcctcttcctcggttgcttcttcttccctaaagacgcagactataaacaaaagagaagaaagaagaagcttagaagagtttcttcttcttctggttcatctctatcctcttcttggacgtatttaaaacgagttttcttatccacgacaaggatatccaaatcccgtaaccaaacacatcctaacgttactttaacatccgcaagatcatctcaaaactccctcgtcactctcgtccaacccgataccacaaaccaacccgacccggaaacacgtattcatcagcaaaccgaattcgagatctcctcttccgacgagattttcccttgtaactcgtgtggcgagattttcccaaaaatcaatctcctcgagaatcacatcgcgatcaaacacgccgtgtcggagctaatcgccggagaatcaagcacgaacatcgtcaagatcatattcaaatctggttggccggagcaaggtaattacaaatctccggtgatcaatcgaatcttaaaaatccacaacagttcaaagattctcaccagattcgaagagtatcgtgagttcgtgaaagctaaagccgctcgtagcaacggcggtggaagacggtgggacgatgaacgttgcgtcgccgacggaaacgaacttttacgattttactgctcgacgtttatgtgtgatttagggcaaaacggtaaatcaaatctctgtggtcatcagtattgtagtatctgtggtatcatcggatctggattctcgccgaagctcgacgggatcgcgacgttggcgacggggtggagaggacacgtggcggttccggaggaggttgaagaagagtttgggtttatgaatgtgaaacgggccatgttggtttgtcgggttgtagcgggtcgggtcgggtgtgatttgattgatgatgatgacgtggataagagtgatggtggagggtatgattctctggttgggcagagtgggaacaagagtggggctctgttgaggatcgacgatgatgagcttttggtttttaatccaagggctgtgcttccttgttttgttattgtgtatactgtgtaa

SEQ ID NO: 3 - DNA, 917 bp, Arabidopsis thaliana
atgatgatgagagcagaagaagataactacaatctaaatcctccaccatggctaatcccaatgctaagagcaaactacttcatcccttgttcaatccacgccgcttccaacaaaagcgagtgcaacatgttctgtcttgactgttcttctgaggccttttgctcttactgtttgctcaatcacagaaaccatcgtgtcctccaggttctttcatcaacttcaaatcatttttttctctcttaccaattcacccaacagagttaagaaaatgggattttcattacttgcagatacggagatcatcgtaccacaacgttgtgagagtaaacgagattcagaagtacatagacatatcttgtgttcagacatatataatcaacagcgcaaggatcgttttcttgaacgaacgtcctcagccaagaatcggcaaaggagtcaccaatacttgtgaaatctgttgcagaagccttctcgattctttccgtttctgctctctcggttgcaaagtaactcttctttcctctgttttcctctgttttgaatgaatatctgaatttgctctgtatagttgaaatgaccatattgcccttttgtttggtttatttcagcttggaggaatgaagcgtgatccaagtctaaccttctctttgagagggaagcatggaagagagtacgaaggtgagtgggaatctgatgaagcgactacaccaactaagatacgcaagacatgtgctttcaaccgtctgatgagtggtctttccatctccaccgttaaatgtgattacttgtcaggagatcaaccgtcttcgagctccggtgatgagagcggttttaaactttctccggggacaccgccgatatataatcaccggaattcaagtagacggaagggcgtcccacaccgtgctcctttctaa

SEQ ID NO: 4 - DNA, 1143 bp, Arabidopsis thaliana
atgacgttccgaagtttactccaggaaatgcggtctaggccacaccgtgtagttcacgccgccgcctcaaccgctaatagttcagaccctttcagctggtcggagctcccggaggagctgcttagagaaatcctgattagggttgagactgttgacggcggcgattggccgtcgcggcgaaacgtggtggcttgtgccggcgtttgtcgtagctggaggattctcaccaaggagattgtagctgttcctgaattctcctctaaattgactttccctatctccctcaagcagtctggtccaagagattctctagttcaatgctttataaaacgtaatcgaaatactcaatcgtatcatctctatctcggattaactacctctttgacggataacgggaagtttcttcttgctgcttctaagctgaagcgcgcaacttgcactgattacatcatctctttgcgttcagacgatatctcaaagagaagcaacgcgtatcttgggagaatgagatcgaacttccttggaacaaaattcacggtctttgatggtagtcagaccggagcagcgaagatgcagaagagccgctcttctaatttcatcaaagtttcacctagagttcctcagggaagttaccccatcgctcacatttcatacgagttaaacgtcttaggctctcggggaccgagaagaatgcgttgcatcatggatacaatacctatgagcatcgtggagtcgcgaggagtagtagcttcaacatccataagctctttttccagtcggtcatcaccagtctttaggtctcactcaaaaccattgcgcagtaatagtgcatcatgtagcgactcaggcaacaacctgggagatccaccattggtgctgagcaacaaagctccacggtggcatgagcagttacgttgctggtgcttaaatttccatggtcgagtcacagtggcttcggttaagaactttcagcttgtggcagttagtgactgtgaagcagggcagacatctgagaggatcatactccagtttgggaaagttgggaaggacatgtttaccatggattatggatatccgatttctgcgtttcaagcgtttgctatctgcctgagcagttttgaaaccagaattgcctgtgaataa

SEQ ID NO: 5 - DNA, 1854 bp, Arabidopsis thaliana
atggcgattgaaactcagcttccttgcgacggtgacggtgtgtgtatgcggtgtcaggtgaatcctccgtcagaagagactctcacttgtggcacgtgcgtcactccatggcacgtgccgtgtctcctccccgaatcactcgcttcttccactggagagtgggagtgtcccgattgctccggcgttgtcgttccctccgccgctccgggtaccggaaacgctcgacctgaatcttccggttcagttctcgttgctgcgatccgtgcgattcaggctgatgagactttaaccgaagctgagaaagccaaaaaaaggcagaaactgatgagtgggggtggtgacgatggtgtcgatgaagaagagaagaagaagttagaaatcttttgttctatttgcattcaattgccagaaagacctatcacgacaccgtgtgggcacaatttctgtttgaaatgtttcgagaaatgggcagtaggtcaagggaagctaacttgtatgatatgccgaagcaaaattccgagacatgtggcaaaaaatcctcgcatcaacttagctctagtttctgctattcgtttagcaaatgttaccaaatgttctgttgaggcaactgcagccaaggttcatcatattatccgcaaccaagaccgtcctgagaaagcatttactaccgagcgggcagtaaaaactgggaaagctaatgctgctagcggtaagttttttgtgacaatacctcgtgatcattttggtcccataccagctgagaatgatgtcactagaaagcaaggtgttttggttggagaatcttgggaggacaggcaagagtgtaggcagtggggagctcatttcccgcatattgctggcattgccgggcaatcagcggttggagctcagtctgtggccctctctggaggttatgacgatgatgaggatcatggtgaatggtttctctacacaggaagtggtggaagggatctcagtggaaacaaaagaattaacaagaaacagtcgtctgaccaggcgtttaaaaacatgaatgaatctctaagacttagttgcaaaatgggctatcctgtccgagttgtcaggtcttggaaggagaagcgttctgcatatgcccctgctgaaggtgtgagatatgatggggtctatcgaattgagaagtgctggagtaatgttggagtacagggttcttttaaggtctgtcgttacctgtttgttagatgtgacaatgagccagctccatggaccagtgatgagcatggcgatcgtccaagaccgttgcctaatgttccggagcttgagactgctgctgacctgtttgtgagaaaggagagtccatcatgggatttcgatgaagctgagggtcgttggaaatggatgaagtctcctcctgttagcagaatggctttggatcctgaggagaggaagaagaataagagagcaaaaaatactatgaaggccagacttctgaaagaatttagttgccaaatctgtcgggaagtgctgagtcttccagtgacgacgccttgtgcacacaacttctgcaaagcatgcttagaagcgaagtttgctgggataactcaactgagagagagaagcaatggcggacgtaaactacgtgcaaagaagaacatcatgacctgcccttgctgcacgacggatctctccgagtttctccaaaacccgcaggtgaacagagagatgatggagataatagagaattttaagaagagtgaggaagaggctgatgcatccatttctgaagaagaagaagaagaatccgaacctccaactaagaagattaagatggataacaactctgttggtggtagtggtacaagtctctcagcttaa

SEQ ID NO: 6 - DNA, 546 bp, Arabidopsis thaliana
atggagggtcagagaacacaacgccggggttacttgaaagacaaggctacagtctccaaccttgttgaagaagaaatggagaatggcatggatggagaagaggaggatggaggagacgaagacaaaaggaagaaggtgatggaaagagttagaggtcctagcactgaccgtgttccatcgcgactgtgccaggtcgataggtgcactgttaatttgactgaggccaagcagtattaccgcagacacagagtatgtgaagtacatgcaaaggcatctgctgcgactgttgcaggggtcaggcaacgcttttgtcaacaatgcagcaggtttcatgagctaccagagtttgatgaagctaaaagaagctgcaggaggcgcttagctggacacaatgagaggaggaggaagatctctggtgacagttttggagaagggtcaggccggagagggtttagcggtcaactgatccagactcaagaaagaaacagggtagacaggaaacttcctatgaccaactcatcattcaagcgaccacagatcagataa

SEQ ID NO: 7 - DNA, 815 bp, Arabidopsis thaliana
aactctttgtttcttgtttgttgattaacccttaattaaatgtgtgcacttgtccctccattatatcccaatttcggctggccttgcggagatcatagcttctatgaaaccgacgacgtatccaacacgtttcttgattttccgttgccggacttgacggtgactcatgagaatgtgtcgtctgagaataacagaacattactagacaatcccgtggtgatgaagaagcttaatcacaacgcgagtgaacgtgagcgtcgcaagaagatcaacacaatgttctcatctcttcgttcttgtcttcctcccaccaatcaaacgaagaagttaagtgtttcggcaacagtttcacaagcattgaagtacataccagagctgcaagagcaagttaaaaagctcatgaagaagaaagaagagctctcgtttcaaatttcgggtcaaagagatctcgtttacaccgaccaaaacagtaagtcagaggaaggggttacaagctatgcgtcgacagtttcttcgactaggctcagtgagactgaagtgatggtccaaatttcatcgttacagactgaaaaatgttcgtttgggaatgtcttgagtggtgtagaagaagatgggttggttcttgtgggtgcttcatcttcaaggtctcatggagagcgactcttttactctatgcatcttcagataaaaaatggccaggtgaattccgaagaattaggtgatagattgttgtacttgtacgagaaatgtggacactcgtttacatgaggcgcgccaaaaattggagctctgcagagctttcgttcgtatcatcg

SEQ ID NO: 8 - DNA, 585 bp, Arabidopsis thaliana
atggaacgtgacgactgccggagatttcaggactcgccggcgcagacgacggagagaagagtgaaatataaaccaaagaagaaaagagccaaagatgatgatgatgagaaagttgtttcgaagcatccaaattttcgaggtgtcagaatgagacaatggggaaaatgggtgtccgaaatcagagagccaaaaaagaaatcaagaatctggctcggtactttctccacggcggagatggcggcgcgtgctcacgacgtggcagctttagccatcaaaggcggttctgcacatctcaacttcccggagctcgcttatcacctccctagaccagctagtgccgaccctaaagacatccaagctgccgccgccgcagctgcagccgctgtggccattgacatggatgtagagacgtcttcgccgtcgccatctcccacagttacggaaacgtcatctccggctatgatagcactctccgacgacgcgttctccgatcttcctgatctcttgctcaacgtgaaccataacatcgatggcttctgggactcttttccctatgaagaacccttcctctctcaaagttactag

SEQ ID NO: 9 - DNA, 637 bp, Arabidopsis thaliana
tcttgtttgttgattaacccttaattaaatgaagatacaatgtgaagtgtgtgaaaaggctgaagcagaagtactttgttgttcagatgaagctgtactatgcaagccatgtgacattaaggttcatgaagctaataaacttttccaaagacatcaccgagtcgccttacaaaaagatgcagcctcagccaccacagcttctggagctcctctatgtgatatctgccaggttccaatctcttttctctttaaacactcgctgagctctttaaccgatgtctcatatatatgtatatgcaggagagaaaagggtacttcttctgcttagaggatagagcaatgctgtgcaatgattgtgatgaagccattcacacttgcaattctcaccaaagattcttactttctggagtacaagtttctgatcagtctttgactgaaaactccgaatgcagcactagttttagctctgaaacttaccagattcagtcaaaagtgtctctgaatagtcagtactctagtgaggaaactgaagctggaaactcaggtgagatagtacacaagaatccttctgtaatcttaagtccttagggcgcgccaaaaattggagctctgcagagctttcgttcgtatcatcggt

SEQ ID NO: 10 - DNA, 834 bp, Arabidopsis thaliana
ccttctataaatctctgcttctcgttgcctctccaaaaccctctcaaactcaaatcaaccttcttccatttttcaaattacaaacatacacaacaacaacaaaacctcttactcactccaatggctcgccttctctttcgtcttctcgtagaatccaacactccgtctccggcgattgataactccaccgccgcgttgaattctgatctcgtcgtcatcctcgctgctctcctctgcgccttgatttgcgttctcggcttaatcgccgtttctcgatgtgtctggctccgtcgtctcgcagccggaaacagaacagtctccggatctcaaactcaatctcctcaacctccggtggcagcggcgaacaaaggcctgaagaagaaagtccttcaatctctcccgaagcttacgttctcgccagagtcacctgagtcggagaaattcgcagagtgcgcgatctgtctagctgaattctctgccggcgacgagctccgagttttaccgcagtgtggtcacgggttccacgtggcttgcattgacacgtggctaggatctcactcgtcttgcccttcttgccgtcagatcttggttgttgccaggtgtcacaagtgtggaggtttacccggtagctctagctccggacttgaatccgaacccgaaatcgagatccgaatcaagcaaggcgaagatgaccccaactccttcttgccataatcattttagtttcccatttatttattagaaaactctataatttaatgcagatcattttagtgggatagtgtttagtctcttgatgtacatggtttattgtaatttgtaaatgttgtatga

SEQ ID NO: 11 - DNA, 807 bp, Arabidopsis thaliana
atgcattatcctaacaacagaaccgaattcgtcggagctccagccccaacccggtatcaaaaggagcagttgtcaccggagcaagagctttcagttattgtctctgctttgcaacacgtgatctcaggggaaaacgaaacggcgccgtgtcagggtttttccagtgacagcacagtgataagcgcgggaatgcctcggttggattcagacacttgtcaagtctgtaggatcgaaggatgtctcggctgtaactactttttcgcgccaaatcagagaattgaaaagaatcatcaacaagaagaagagattactagtagtagtaacagaagaagagagagctctcccgtggcgaagaaagcggaaggtggcgggaaaatcaggaagaggaagaacaagaagaatggttacagaggagttaggcaaagaccttggggaaaatttgcagctgagatcagagatcctaaaagagccacacgtgtttggcttggtactttcgaaaccgccgaagatgcggctcgagcttatgatcgagccgcgattggattccgtgggccaagggctaaactcaacttcccctttgtggattacacgtcttcagtttcatctcctgttgctgctgatgatataggagcaaaggcaagtgcaagcgccagtgtgagcgccacagattcagttgaagcagagcaatggaacggaggaggaggggattgcaatatggaggagtggatgaatatgatgatgatgatggattttgggaatggagattcttcagattcaggaaatacaattgctgatatgttccagtga

SEQ ID NO: 12 - DNA, 1468 bp, Arabidopsis thaliana
ttaattaatcgaaatctcactctctctcattttcgactttagaaatggcgaccaacgcagatccagctccgacgaagaaaccaaggaacagtagaaaggcgttgaagcagaagaatgagctcgtggagacgccaccatcgcctgtctccgtcaaggggaagtcagcgaagtctttcgagcaagatctgatggagatgcagacaatgttggagaagatgaagatcgagaaggataagacggaggagttacttaaggagaaggatgagattctgagaaagaaggaggaggagctagagaccagagacgctgagcaggagaagctcaaggtggagctgaagaagcttcagaagatgaaggaattcaaacctaacatgacttttgcttgcggtcagtcatctctcacacaggctgagcaagaaaaggcgaataagaagaagaaaaaggattgtcctgagacaaagcgaccatcgtcctcatacgttttgtggtgtaaagatcaatggactgaagtcaagaaggaaaaccctgaggctgacttcaaggagacttcgaacattctgggggctaaatggaagtctcttagtgcagaagataagaagccttacgaggaaaggtaccaggttgagaaagaagcttacctccaggtcattgctaaggagaagcgcgagaaggaggccatgaagcttctggaggatgaccagaagcagagaactgcaatggaattgcttgatcagtatctcaactttgtccaggaagctgaacaggacaacaagaagaagaacaagaaggagaaggaccctctgaagccaaaacatcccgtatctgccttccttgtttatgcaaacgagaggagagctgctttacgcgaagaaaacaaaagcgtcgtggaggtcgcaaagatcactggagaggagtggaagaacttgtcagacaagaaaaaggcaccctacgagaaggtggcaaagaagaacaaggagacatacctgcaagcaatggaggaatacaagaggacaaaggaagaagaagccctgagtcagaagaaagaagaagaggaactcttgaaactccacaaacaagaagctcttcaaatgcttaagaagaaggagaaaactgataatctgatcaagaaggagaaggcgaccaagaagaagaagaacgaaaacgttgaccctaacaaaccaaagaagcctgcttcttcatactttctcttcagcaaggacgaaaggaagaaattgacagaagaacgtcccgggacaaacaacgctactgttactgctctcatttcactgaaatggaaggaattgagtgaagaagagaagcaagtttacaacggaaaggccgcaaaactgatggaagcatacaaaaaggaagtggaagcttacaacaagaagtctgcggctactaccagtagctagataaatctctcttagtattgaaatcatgttcaagtcctgttgaacggcgcgcc

SEQ ID NO: 13 - DNA, 641 bp, Arabidopsis thaliana
aactctttgtttcttgtttgttgattaacccttaattaaatgactcgaccgtcaagattacttgagacggcggcgccaccaccacaaccgtcggaggagatgatcgcagcggaatccgacatggtggtgatcttgtcggctcttctttgcgctcttatctgcgttgctggtctcgccgccgtcgtacgatgcgcttggctccggcggtttacagccggaggagattcgccgtcaccgaacaaaggcttgaaaaagaaagctcttcagtctcttccaagatccactttcaccgccgcggaatcaacctccggcgccgccgctgaagagggagactcgacggaatgtgctatttgcctcactgacttcgccgacggtgaagaaataagagtgcttcctctttgtggtcattctttccacgtggagtgtattgacaaatggctagtttctaggtcttcttgtccttcttgtcgcaggattcttacgccggtgagatgtgaccggtgtggtcatgcttctacggcggagatgaaagatcaagctcatcgtcatcaacatcaccaacactcttctactaccattcctacgtttcttccttaaggcgcgccaaaaattggagctctgcagagctttcgttcgtatca

SEQ ID NO: 14 - DNA, 1191 bp, Arabidopsis thaliana
atgagtttgttctgtaattcaatcgaaaccctttatccaaaaccattcctttcacacaaatctcacttctttaccttctccaattccaaattccaaaaccctaaattcacaagcttcccacttcgtcaccaatggcggatcgaatcatgtctgaaatcagcatcttcatcagaaatcgatatggtaagaaacaaagaaggtatctttgcaccaaaggagaagaaagttgtagtcttatgggacttagacaacaaaccaccacgaggtccaccatacgaagccgcaacagctctccgtaaagtcgctgagaaactcggccgagtcgtcgaaatctccgcttacgcaaatcgtcatgcttttatccatttacctcattgggtcgtcgaagagagacgagaaaggaggaaccttgatttcatggagaggaaaggagaagtgactccaattgatccgtacatttgtggtgtttgtggtcgcaagtgtaaaaccaatcttgatttgaagaaacatttcaagcagcttcatgagagggagagacagaagaaagttaataggatgagatctttgaaaggtaagaaacgtcagaagtttaaggagcgttatgtttcagggaatgagaagtataatgaggctgcgaggagtttgttgactcctaaagttggatatggtttagaggctgagctacgtcgagcaggggtttatgttaagacggttgaggataagcctcaggctgcggattgggcggttaagagacagatacaacattcaatgactagagggattgattggttggttttggtgtcggatgataaggatttttctgatatgttgaggaaagctagagaggctgatcttgggactttggttgttagtgatatggatagagcattgggaaggcatgctgatttgtgggtgccttggagtggtgttgagaagggagagattggtgagaaggatttgattccggggaagagaccaaggtttgaggaggatgaggtgggatttggtggtaatgatgagttgttttcgttgtcgtatgatgaggatgagaaggcggagatgacggtggagagtgatgggtttgggaggtttaatgtatcggcgttttcggaagatgaatgggtggaggatgaaggagactttgtgttgagtgatagtagtgatgatgatagtgatgatgagcttttctga

SEQ ID NO: 15 - DNA, 1067 bp, Arabidopsis thaliana
cttgtttgttgattaacccttaattaataatggagagtgttgaattgacgttgaagaacagtaacatgaaagacaaaaccctaaccggcggcgctcaaaatggcgatgatttctccgtcgacgacttgcttgacttctcaaaagaagaagaagacgacgacgttttggttgaggatgaggctgaattgaaagtacaacgaaaaagaggagtctctgacgaaaatacccttcaccggagcaacgatttctccaccgctgatttccacactagcgggctttccgttccgatggatgatatagcggaacttgaatggttatcaaatttcgtagatgattcttctttcacgccgtattctgctccgacgaataaaccggtttggttaaccggaaatcggagacatcttgtacaaccggttaaagaggagacctgcttcaaatcccaacatccggccgtcaaaaccagacccaaacgagccagaaccggagtcagagtctggtctcatggttcgcagtcgttaaccgactcatcttcaagctctacaacatcttcgtcgtcctctcctcgtccttcaagccctctatggctcgccagcggtcagtttcttgatgagccaatgactaaaacacaaaagaagaagaaagtttggaaaaacgctggtcagacgcaaacgcaaacgcagacgcagacgcggcagtgtggtcattgtggagttcagaaaacgccgcagtggagagcaggaccattaggagcgaagacgttgtgtaatgcgtgtggtgtgcgttacaaatcgggtcggttactacccgaatatagacccgcttgtagcccaacattttcgagtgagcttcactcaaaccaccacagtaaagtcattgagatgcgtaggaagaaagagacttctgacggtgctgaagaaaccggtttgaaccagccggttcagacggttcaggttgtctcgagtttttgaagaaattgtggaaggtttttaaaggagcagaattaggatccgacccggttcggcgcgccaaaaattggagctctgcagagctttcgttcgtatcatcgg

SEQ ID NO: 16 - DNA, 1255 bp, Arabidopsis thaliana
ttcatttatttgtcagctttcaaactctttgtttcttgtttgttgattaacccttaattaagatggatctgactggaggatttggagctagatccggcggtgttggaccgtgccgggaaccaataggccttgaatcgctacatctcggtgacgaatttcggcaactagtgacgactttacctcccgagaaccccggcggttcgttcacggctttgcttgagcttccacctacacaagcagtggagcttctccatttcactgattcttcgtcttctcaacaagcggcagtgacagggatcggtggagagattcctccgccgcttcactctttcggtgggacattggcttttccttctaactcagttctcatggagcgagcagctcgtttctcggtgattgccactgagcaacaaaacggaaatatctccggggagactccgacgagctctgtaccttccaattcaagtgctaatctcgacagagtcaagacggagcctgctgagaccgattcatctcagcggttgatttctgattcagcgattgagaatcaaatcccttgccctaaccagaacaatcgaaatgggaagaggaaagatttcgaaaagaagggtaaaagctcgacgaagaagaacaaaagctctgaagagaacgagaagctgccatatgttcacgttagagctcgtcgtggtcaagcaaccgatagccatagcttagcagaacgagcaagaagagagaagataaatgcacgaatgaagctgttacaggaactggtcccaggctgtgataagattcaaggtaccgcgctggtgctggatgaaatcattaaccatgtccagtcattacaacgtcaagtggagatgctatcaatgagacttgctgcggtaaaccccagaatcgacttcaatctcgacaccatattggcttcagaaaacggttctttaatggatgggagcttcaatgccgcaccaatgcagcttgcttggcctcagcaagccattgagaccgaacagtcctttcatcaccggcaactgcaacaaccaccaacacaacaatggccttttgacggcttgaaccagccggtatggggaagagaagaggatcaagctcatggcaatgataacagcaatttgatggcagtttctgaaaatgtaatggtggcttctgctaatttgcacccaaatcaggtcaaaatggagctgtaaatttaaatacccaggaaatacccagcaaattggagctctgcagagctttcgtt

SEQ ID NO: 17 - DNA, 771 bp, Arabidopsis thaliana
atgggaaaacaaatcaacatagagagtagtgctactcatcatcaagacaatattgtttccgttataacagccacgatatcctcctcctccgtcgtaacgtcttcgtcagactcttggtctacctccaaaagatcgttagtgcaagacaatgactccggagggaaacggcggaagagcaacgttagtgatgataacaagaatccgacgtcgtatagaggagtgaggatgaggagttggggaaaatgggtgtcggagattagagagccgaggaagaaatcaagaatatggcttggcacttatccaacggcagagatggcagctcgtgctcatgatgtggcggctttagctattaaaggcaactccggttttcttaatttccctgaattatccggtttgcttcctcgtccggttagctgctctcctaaggatatacaagctgcagctaccaaagccgccgaagcaaccacgtggcacaaaccggttatcgataagaaattagctgatgagctaagccactctgagttgttgtctaccgctcagtcttcgacttctagtagtttcgtgttttcttcggacacgtcggagacttctagtacggacaaggaaagcaacgaagagacggtgtttgatttgccggaccttttcacggacgggcttatgaacccaaacgatgcgttttgtttatgcaacggcacctttacgtggcagctttacggagaggaggatgtagggttcaggtttgaagagccgtttaattggcaaaatgactaa

SEQ ID NO: 18 - DNA, 1375 bp, Arabidopsis thaliana
catttattatgttgttaataaaatttaataattcaatttagatcggaggttaaacatgcttatcatattgtttaacagccatcgactaagatttgaaatctttaacgtgaaccagctccgatggcgattccacaaagaaacaagcgcaaagcaagatcctcgccggaacggctaacacaaccgccggaactaccacacaactccgacgttccttcttcttcgtcttcttctgccgctgataatttcttttcttggtcgacgaaacagtttgctttcccgccaggttatagatttgtaccaaaggaccaagaactcatctttcattacttgaaacccttttcgcaaggcaataaatgctcattgctcaatgttcctatccatcgtgtgaacatctacgagtcaaatccacaacatctttcaggtttgtctccgtcaatggctctgttctttattctctaatcgtggtttatgtatataaatggctctgttcttttgaattcaatacagagaaatatgagaagggtaatgataaagattggttctatatatcggagaggaccaagaccggtaaggctggaagaagtaataaacgtgtcgacaatggaggatattggagcgcaactgtagctgcccaaaagatcaacgctggaaatggcatagtcggctacaagacttcactagagtactatgttgggaaacaatcaaatagtgtcaaaggggattggttaatgcaagagtactggtttgagtcttctgatgataacaacaacgagaaggtgagggtaagtgtctttacttggattccaagttattaggattcgtgacttttggatttattgtgttttgttttggttggtgtgtataggtggatcatgctttgtgcaagatttatctgactccagcggcagcaaagaagaagaaagctgaggaagcagagaatgagaagctgaagaaagaagaagacgttgagcagctggatttgaatcaaccagaccaattgcagctgcaacagcctcatgatattgtgtatcaaccgcagtattgtttacttccagaacatcatcagccgcagccttttcctgataacttttctgagttgatcagctttcaacagcaaccagtgatgatcccagacgattttgaagatttcttggctgaattcactaaaccacattcactggatggagatgaagaattcaacaattatggtttgtttgaaggcttctttgacacagaaggaatgataaaacattaaactaactgatctcaatctgctcatactttgtcattttggtttttgttttcaaacaccaaaaacaaaaagaaaactaactgatctagcttttgtgcctttatgagttttgttatcagaaag

SEQ ID NO: 19 - DNA, 1230 bp, Arabidopsis thaliana
atgtctcaagttagagatactccggttaaattgtttggctggacaattacaccggtttctcatgatccatactcttcttcgtcccatgttcttcctgattcttcctcgtcttcctcgtcttcttctctatcacttcgaccacacatggtatgtttcatggtcttacctttatttgttaagaaatgctaaagatttaatattttctctagtccttgtatcagtttgaaactagttcatgatgttaatcctaatccaagttccttcaatttttttcagatgaataaccaatctgttactgacaatacaagtcttaagctgtcatctaatcttaacaacgagtcaaaagaaacatctgagaacagtgatgaccaacacagcgagatcacaacaattacatcggaagaagagaaaacaactgaactgaagaaaccagacaagattcttccatgtccgagatgcaacagcgcagacaccaaattctgttactacaacaactacaacgttaaccagccacgtcacttctgtagaaaatgccagaggtattggaccgctggtggatccatgaggatcgtcccggttggctcaggccgtcgcaagaacaagggatgggtttcttcagaccagtacctgcacatcacttccgaggatactgacaattacaatagctcctcaacaaagattctaagcttcgagtcttcggactctttggtaactgagaggcctaagcatcaatcaaacgaagtgaagataaacgctgaacctgtttcacaagaacccaacaacttccaagggttacttcctccccaagcatcccctgtttcgcctccttggccttaccaataccctccaaaccctagtttctaccacatgcccgtctactggggctgcgcgataccggtttggtctaccctcgacacttctacatgtcttgggaaaaggacaagagacgaaacttctcatgaaactgttaaagagagtaaaaatgcttttgagagaacaagcttgcttttggaatctcagagcatcaaaaatgaaacaagtatggctacaaataaccatgtgtggtatccagtaccgatgacccgcgagaagacacaagaattcagctttttcagtaatggagctgaaacaaagagcagcaacaacagattcgtccctgaaacgtatcttaacctgcaagcaaaccctgcagccatggcaagatctatgaacttcagagagagcatataa

SEQ ID NO: 20 - DNA, 438 bp, Arabidopsis thaliana
atggagggatatgataatgggtcgttgtatgctccttttttgtcgttgaaatctcattcgaaaccagagctgcatcaaggcgaagaagagagctcaaaggttagatcagaaggttgttcgaaaagcgtggagtcgtcgaaaaagaaggggaagaaacaaaggtatgcgtttcaaacaaggagccaagtggatattcttgatgatggttatcgatggaggaaatatggccaaaaggccgtcaagaacaacaagttccctaggagttactataggtgtacatatggaggatgcaatgtgaagaagcaagtgcaaagattaacagtggaccaagaagtggtcgtgacaacctacgaaggagtgcattcgcatcccatcgagaaatccaccgaaaacttcgagcatattctcactcaaatgcaaatctactcttctttctag

SEQ ID NO: 21 - DNA, 579 bp, Arabidopsis thaliana
atgtcaccacagagaatgaagctatcatcaccaccagttaccaacaacgaaccaaccgccaccgcttctgccgttaaatcttgcggcggaggaggtaaagaaaccagctcatcgaccacgaggcatccagtgtaccacggagttcgcaaacgccgatggggaaaatgggtttctgagatcagagagccccggaaaaagtctcggatttggctcggatcttttccggtgccggagatggctgctaaggcctacgacgtggcagcgttttgtctaaaaggtagaaaagctcagctgaatttccctgaagaaatcgaggatctacctcgaccgtccacgtgtactcccagagatatccaagtcgcagcggccaaagcagccaacgccgtgaagatcatcaaaatgggagatgatgacgtggcaggaatagacgacggagatgatttctgggaaggcattgagctgcctgagcttatgatgagtggaggtgggtggtcgccggagccttttgttgccggagatgatgccacgtggcttgtcgacggagacttgtatcagtatcagttcatggcgtgtctgtga

SEQ ID NO: 22 - DNA, 2220 bp, Arabidopsis thaliana
atgaaagttcgttcatttatatctctgaaagttgaaaaatcttttcaaaagaaaaaaaaaaacactccaaaagaaactatgtcgaccgatagttcacaatttgaagttgttcccgctaatgcctctgctttagacaacgacgtttcctctcacatgtctatgttgtatcaggatattgtccgaaaccccgaacttttctgggagatgctccgggatttccatgaatcttcggacaaaaaatttaagtgagttatgcatgttcttttagtgtttttggttttcttaatgaattttattgtttataaaattacaattgtggatgaaaaatcctactctacatcgggttgataaatttattagagattctacaactttattcacaatccattgtatggtgggttataaatataccaaaggagtcagtagacagtagccttgttctccttggtttgagaaacactgggataagtggcaatttttttgtttaagggaaaaaaatcttcaaaatattgttattggaaaaggtgactttgagctttggccctgaacttcctcttaaaataaaaatgactcgtattgtcgtagatttaagggcttgataaaatttatttggctagatggaagcataaaccaattaggttatcgaattgtgaaggcacggaagtgtgtatggcttattgaattggatctggtttgctcttaaactgtagtccaaaatcagtctttatttggttttgacaaaaagatttgaattgataagccacgaagagctgtaagattttttttaattttttttttggttaccgttaatgctaaattgttttaaaagtaaaaatgttgggaaatggaaattgcttttatgctcttctgatatgttcaatgttttgtgcttcagttgatctattctcttgactaaatttcattacattaaactgtttctgattttttccgtttgtaaaggattcctattgtgggtggaaaaagtcttgatctgcatcggcttttcaacgaagtcacatctcgaggtggtcttgaaaaggtaacaagttcatagtgccattgaacatcaagttttaaatctattttttcttcattaaatattatacaattctgttttaaaaatcctattgattttaggtgatcaaggatcgtagatgcaaagaagtgattgacgcattcaattttaagacaacaataacaaattcagcatttgttctaaggaagtcgtatcttaaaatgctctttgaatttgagcatctctattacttccaagctccactttctacattttgggaaaaaggtcttaaaataccattcatgatctctctctttctaattctccaagaagatccaagattaatatacatgtttgtcctttcttcgcagaaaaagcattgaagctccttatcgaaaaatctgcaaaccgtgacaaaggtacttaaaaattcatgtttttggatatgttgcatgttttttgcatttataaatccaaagtttttagattctcttctttcatcttattttgagtgttgggatttgctttctgaaacatattcagactctcaagaactgaaacctggcaccgtgattactgggatcatcgatgggaaattcgaaagtggttatcttataagcacaaaggtaggctcagaaaagctcaaaggaatgctttaccacatttctcctgaaactaaaagaggcaagaagaaagcaaaatcatctcagggggattctcataagccacctaagcgtcaaagaaccggttacaacttcttcgttgctgagcaatccgtgaggattaaagctgagaacgctggacaaaaagtatctagccctaagaattttgggaacatgtggaccaatctctctgaatctgatagaaaggtaattcaaaagacttaagaaattaactgatgattttaaactacgttttcaagtttcatttatctcgaatggatttaacgggtttggtttatgatttttgaacaggtttattatgagaaaagtcgtgaggatgggaagaggtataaaatggagattttacagtacagatctttaatggaatctcgtgtggcggaaattgtagccgcaactgatgcaggtacaagtgcaagtgcagcggagactgcggatgaggcgagtcaagaaaatttagccaagactgatgcatgcacaagtgcaagtagtgcagctgagactgaggatgaggtgagtcagtag

SEQ ID NO: 23 - DNA, 678 bp, Arabidopsis thaliana
ttaattaaatggatgctcgtaagagaggacgccctgaagctgctgcctctcacaactccaatggcggattcaagaggtctaagcaagcacttctggatgtccatttggtgacaattgccacttcttgcactatgtgcccggtgggtacaatgctgcagcgcagatgacaaatctccgaccaccggtttctcaagtttccagaaatatgcaaggatctggtggtcccggcggcagattctcagggagaggagatccaggatcaggccctgtttcaatctttggtgcttctacttccaagatcagtgtagatgcttctttagccggtgccatcattggaaaaggtggaatccattccaaacagatatgccgtgaaacaggagcaaaattatcgattaaagatcatgaaagagacccaaacttgaagattatcgagctggaaggaacatttgaacagatcaatgtagcgagtgggatggtgagagagcttatagggaggcttggatcagtgaagaaacctcaagggattggtggtcctgaagggaaaccacatcctgggagcaactacaaaaccaagatctgtgataggtactctaaagggaactgtacatatggagatagatgccattttgctcatggtgaatctgagctgcgcaggtcaggaatcgcttagggcgcgcc

SEQ ID NO: 24 - DNA, 855 bp, Arabidopsis thaliana
atggctcctcgtcagaagaaacctaacaagtccgatgatgatgatggtgatttgcataggaagaaacagagctttttcaaacagagatttccaggctttaagaagaaagcctcagagctctctgttctctgcggcaactctgtcggtttcatctgttacggtcccgacaacgatctccatgtttggcctcagtctcaagatcataacccacaagccctacatgagatcgtggccaagttcaatgccttgagtgatgagaggaggaagaatcatgcatgtgatctcaatgacttccctcatcatctcaagggtttgtctcgtgaggagttaaggaagcatctccttcaccttgactctcaattacttggagtcagggaacaaaagatagaaattcttaagaagacgctcacgggttcttccgaaaaagatggtgcaagggtttcagagaactcggccatctccgatcacaagttgaagatagagcctaatttgacggatatattgtcagaagatcatctaattagggtttcagataagaagctgggttcgtgtgatgtatttgacgagttggcttacgtggtccgcgggtcaaggaatttgaacgagaatgtttccaattacgaatcaaaagatgcagcttacacgggaatggatcatcttggcactttcggcggtaattatcttcaggaggcggcggcagaactttaccaaacttacaatctagggaatttttgtgatgatcatgtttgggatctggagtttgcctcaagactaccaccacttcatacatttagcgatcctctcatgaccaccaatacttgccaaacgatgagctccgatatgatttcaatttga

SEQ ID NO: 25 - DNA, 915 bp, Arabidopsis thaliana
atgggtgcgataaaccaaggaataagcttgtttgatgaatcacaaaccgtcataaaccctattaataccaaccatctaggtttcttcttctctttccctagtcacagcaccttatcttcatcatcttcgtcgtcttcgtcttctccttcttctcttgtgtctccatttcttggtcataactccctaaactccttccttcataataacccgtcttcattcataagtcatcctcaagattccatcaatctcatgaccaatctccccgaaaccctaatctcgtctttgtcctcatcaaagcaaagggacgatcatgatggttttcttaatctcgatcatcatcgtcttaccggtagtatttcatcccaaagacccctgtcaaatccatgggcatggagttgtcaagcgggatacggaagcagccagaaaaacaaccatggaagcgagattgatgttgatgataatgatgatgaggttggcgatggtggtggcattaatgatgatgataatggtcgtcatcatcatcatgatactcccagtcgtcatgataaacataacacagcgtcattaggcgtagtttcttctctgaagatgaagaagcttaagacaagaagaaaagtgagggaacctcggttttgctttaagacacttagcgaggttgatgtcttagatgatggatatagatggagaaagtatggccagaaagttgtcaaaaacacccaacatcccaggagctattacagatgcacacaagacaagtgtagagtgaagaagagagtggagagattagcagatgacccaagaatggtaatcactacttacgaaggaagacaccttcactctccttctaatcatctcgacgacgactctctctccacctctcacctgcaccctcctctctccaacttcttctggtga

SEQ ID NO: 26 - DNA, 1005 bp, Arabidopsis thaliana
atggaatctctcatcaatcccagccatggcggaggaaactacgattctcactcttcttctctcgatagtctcaaaccaagcgtactagtcatcattctcattctcctcatgactcttctcatctccgtttccatttgcttcctcctccgctgtctcaatcgctgtagccaccgctccgttctccctctttcatcttcctcttccgtcgcaaccgtaacttccgattcccgacgattctctggacatcgagtctctcccgaaacagaacggtcctccgtgcttgattcgcttccgattttcaaattctcctccgtcactcgccgatctagctccatgaattccggagattgcgccgtttgtttgtcgaaattcgaaccggaggatcagctccgtcttcttcctctctgttgtcacgcttttcacgccgattgtatcgatatctggctagtctctaaccagacttgtcctctctgtcgctctcctctcttcgcttcagaatctgatctcatgaagtctctcgccgtcgtcggctcaaacaacggcggaggagaaaacagcttccgtctcgaaatcggatccatcagccgtcgtcgtcaaacaccgattccagaatccgttgagcagcatcgaacttactcaatcggttcgttcgattacatagtagacgacgtagattcagaaatctcagagtcaaatttcaaccgtggaaaacaggaagacgcgactacaacaactgccacagcaacggcggttacgactaatccgacgtcgtttgaagctagtttagcggcggatataggtaacgatggttctagaagctggctcaaggattacgttgacagactctcacgaggtatatcgtcgcgtgcaatgtcgtttagaagctctggtagattttttactgggagtagtcgtcggagtgaggaattgacggtgatggatttagaagcgaatcatgccggagaagagataagtgagcttttccggtggctctcaggggtgtga

SEQ ID NO: 27 - DNA, 738 bp, Arabidopsis thaliana
atggattattcttcgatgcatcagaatgtgatgggagtatcttcatgttcaacacaagattatcaaaaccagaagaaaccattgtcggcgactaggccagctccaccagagcaatcattaagatgccctcgctgtgactccaccaacacaaagttctgctactacaacaactacagtctctctcaacctcgctacttctgcaaatcttgtaggagatactggaccaagggtggaatcctaagaaacatcccaatcggtggtgcttaccggaaacacaaacgctcctcctccgcaaccaaaagcctcagaacaacccctgagcccacgatgacccatgacggcaaatcattcccaacggcgagttttggctataataataataacattagcaacgaacagatggagcttgggttagcatatgccttgttgaacaagcaacctctaggggtttcttcacatctagggttcggaagctctcagtctccaatggccatggatggcgtgtatgggaccacgagccatcagatggagaacacggggtatgcgtttggaaatggtggaggcggtatggagcagatggcgacaagtgatccaaacagggttttgtggggattcccctggcagatgaacatgggaggaggaagtggtcatggtcatggtcatgttgatcagattgattcagggagagagatttggagcagtactgtcaactacattaatactggtgctttattgtag

SEQ ID NO: 28 - DNA, 699 bp, Arabidopsis thaliana
atggataacttcaatgttgttgccaatgaagacaatcaagtgaatgatgtgaagcctccaccacccccaccgcgagtgtgtgcaagatgtgattctgataacacaaaattttgttactacaacaattatagtgagtttcaaccgcgctacttctgcaagaactgtcgaagatactggactcatggtggggctttaagaaacgtaccaattggtgggagtagtcgtgccaagcggacaaggataaatcaaccttcagttgctcagatggtttctgttggaatccaaccaggtagccataaacctttctttaatgttcaagaaaataatgactttgttggatcttttggtgcttcatcttcatcttttgttgctgctgtagggaaccgttttagttctttgtctcatattcatggtggtatggtaacaaatgtgcatccaactcaaacttttcgaccaaatcatcgcctagctttccataatggatcatttgagcaagattattatgatgttgggtctgataatcttttggtaaaccaacaagttggtggatatgttgataatcacaacggttatcacatgaatcaagtggatcaatacaactggaaccagagcttcaataacgctatgaacatgaattataataacgctagcactagcggaaggatgcatcctagtcatttagagaagggtggtccttga

SEQ ID NO: 29 - DNA, 483 bp, Arabidopsis thaliana
atggataattcagaaaatgttctatttaatgatcaaaacgaaaatttcacacttgttgcaccacacccttcttcttcgtacttgacaagagatcaagagcacgagatcatggtctctgctctgcgacaagtgatatctaactccggagctgacgacgcgtcatcatcaaacttgatcatcacaagcgttccgcctccagacgctggcccttgtcctctctgtggcgtcgccggttgctacggctgcacattacaacggccgcaccgagaggtaaagaaggagaagaaatacaaaggagtaaggaaaaaaccatcgggtaaatgggcggcggagatatgggatccgagatcgaaatcaaggaggtggcttggaacgtttcttacggcggagatggcggcacaatcttacaatgatgcggcggctgagtatcgagcaagacgtggtaaaacaaacggagaaggaattaaacggcggtggagatga

SEQ ID NO: 30 - DNA, 732 bp, Arabidopsis thaliana
atggaatattcccaatcttccatgtattcatctccaagttcttggagctcatcacaagaatcactcttatggaacgagagctgtttcttggatcaatcatctgaacctcaagccttcttttgccctaattatgattactccgatgactttttctcatttgagtcaccggagatgatgattaaggaagaaattcaaaacggcgacgtttctaactccgaagaagaagaaaaggttggaattgatgaagaaagatcatacagaggagtgaggaaaaggccgtgggggaaatttgcagcggagataagagattcaacgaggaatggaattagggtttggctcgggacatttgacaaagccgaggaagccgctcttgcttatgatcaagcggctttcgccacaaaaggatctcttgcaacacttaatttcccggtggaagtggttagagagtcgctaaagaaaatggagaatgtgaatcttcatgatggaggatctccggttatggccttgaagagaaaacattctcttcgaaaccggcctagagggaaaaagcgatcctcttcttcttcttcttcttcttctaattcttcttcttgctcttcttcttcgtctacttcttcaacatcaagaagtagtagtaagcagagtgttgtgaagcaagaaagtggtacacttgtggtttttgaagatttaggtgctgagtatttagaacaacttcttatgagctcatgttga

SEQ ID NO: 31 - DNA, 1906 bp, Arabidopsis thaliana
ttaattaataatggcgttgaagtctagttctgctgatggtaaaaccagaagctctgttcagatcttcattgtgtttagtttatgttgcttcttttacattttgggagcatggcaacgaagtggttttggtaaaggagacagtattgctcttgagatgaccaacagtggagctgattgcaacattgttcctagcttgaatttcgagactcatcacgctggcgaatcaagtcttgttggtgcttctgaagctgcaaaggtcaaggctttcgagccctgtgatggtcgttacacggattacactccttgtcaagatcagagacgtgccatgactttcccgagagatagtatgatttaccgagaaaggcattgcgctcctgagaatgagaagctccattgtcttataccggctcctaaaggatatgtgacacctttctcttggcctaagagtcgagactatgtgccttatgctaatgcgccgtataaagcattgactgttgagaaggctattcagaattggattcagtatgagggagacgtttttagattccctggtggtggaactcagttccctcaaggtgctgataagtatatcgatcagcttgcttccgtgatacctatggagaacggaactgttaggactgctttggacactggttgtggggttgcaagttggggagcgtacttatggagcagaaatgtgcgtgcaatgtcttttgcaccaagagattcacacgaggctcaggtccagtttgctctcgagagaggtgttcccgctgttattggtgttcttggtaccataaagttgccatacccaacacgtgctttcgacatggctcattgctctcggtgtttgattccatggggagcaaatgatgggatgtacttgatggaagttgaccgtgtgcttagacctggtgggtactggattctgtctggtcctccaatcaactggaaagtcaactacaaggcatggcaacgtcccaaggaggaccttcaagaggaacaaagaaagattgaggaagctgctaaacttctttgttgggagaaaaagtatgaacacggtgagattgcaatttggcagaagagagtcaatgatgaggcatgccgatcaagacaagatgatcctagagccaatttctgcaaaaccgatgataccgatgatgtctggtacaagaaaatggaggcatgtattacaccgtatccggagacaagtagctcagatgaagtagctggtggtgagcttcaggctttcccagataggctcaatgcagtgccgcccaggatctctagcggttcgatctctggtgttactgttgatgcctatgaagacgataacagacagtggaaaaaacatgtgaaagcctacaagagaatcaacagtctacttgacactggaaggtaccgtaacatcatggacatgaacgcagggtttggtggatttgctgctgctcttgaatcccaaaagctttgggttatgaatgttgttcccacaattgccgaaaagaacagactcggagttgtatatgaacgaggactcatcggtatctaccatgactggtgtgaggctttctctacatatccaagaacatatgacctgatccacgcgaaccacctcttcagtctatacaagaacaagtgcaatgcggatgatattcttctagagatggatagaattctccgaccagaaggagcggttataatccgggatgatgtggatacattgatcaaggtgaagagaatcatcgctggaatgagatgggatgcgaagcttgtcgatcatgaggatggtcctttagttcctgagaaggttttgattgccgtgaagcagtattgggtcaccaactccacctcgactcactgaagttactttatttccggtgtgaccgacattttgatcaggcgcgcc

SEQ ID NO: 32 - DNA, 717 bp, Arabidopsis thaliana
atggcacttgaaactcttacttctccaagattatcttctccgatgccgactctgtttcaagattcagcactagggtttcatggaagcaaaggcaaacgatctaagcgatcaagatctgaattcgaccgtcagagtctcacggaggatgaatatatcgctttatgtctcatgcttcttgctcgcgacggagatagaaaccgtgaccttgacctgccttcttcttcgtcttcacctcctctgcttcctcctcttcctactccgatctacaagtgtagcgtctgtgacaaggcgttttcgtcttaccaggctcttggtggacacaaggcaagtcaccggaaaagcttttcgcttactcaatctgccggaggagatgagctgtcgacatcgtcggcgataaccacgtctggtatatccggtggcgggggaggaagtgtgaagtcgcacgtttgctctatctgtcataaatcgttcgccaccggtcaagctctcggcggccacaaacggtgccactacgaaggaaagaacggaggcggtgtgagtagtagcgtgtcgaattctgaagatgtggggtctacaagccacgtcagcagtggccaccgtgggtttgacctcaacataccgccgataccggaattctcgatggtcaacggagacgaagaggtgatgagtcctatgccggcgaagaaactccggtttgacttcccggagaaaccctaa

SEQ ID NO: 33 - DNA, 797 bp, Arabidopsis thaliana
ttaattaatgttagtcttttggggagagagatggggagagggaagatagttatacgaaggatcgataactctacaagtagacaagtgactttctccaagagaaggagtggtttgcttaagaaagctaaagagttatcgatcctttgtgatgcagaagttggtgttatcatattctctagcaccggaaagctctacgactacgcaagcaattcaagtatgaaaacaatcattgagcggtacaacagagtaaaagaggagcagcatcaacttctgaatcatgcctcagagataaagttttggcaaagagaggttgcaagtttgcagcagcagctccaatatctacaagaatgccacaggaaactagtgggagaggaactttctggaatgaatgctaacgacctacaaaaccttgaagaccagctagtaacaagtctaaaaggtgttcgtctcaaaaaggatcaacttatgacaaatgaaatcagagaacttaatcgtaagggacaaatcatccaaaaagagaatcacgagctacaaaatattgtagatataatgcgtaaggaaaatattaaattgcaaaagaaggttcatggaagaacaaatgcgattgaaggcaattcaagtgtagatccaataagcaatggaaccacaacatatgcaccaccgcaacttcaactcatacaactacaaccagctcctagagaaaaatcaatcagactagggctacaactttcctagcaaaacatgtgggacatcgaacaatatacgaaaagagtttgtatgtcatcttcaggcgcgcc

SEQ ID NO: 34 - DNA, 615 bp, Arabidopsis thaliana
atgcaggatccagcagcatattaccagacgatgatggcgaagcaacaacaacaacaacaaccacagtttgcagagcaagaacagttaaagtgtcctcgttgtgactcaccaaacactaaattctgttactacaacaactacaatctctcacagcctcgtcacttttgcaaaagctgtcgtcgttactggactaaaggcggcgctctccgtaacgttcccgtcggtggtggttctcgtaagaacgcaaccaaacgatccacttcttcttcttcttctgcttcctctccttccaacagtagccaaaacaagaagacgaaaaacccggatccggatcctgatccacgtaattctcaaaaaccggatttggatccgacccggatgctttacgggtttccgatcggtgaccaagacgtgaagggtatggagattggtggaagctttagctcgttgttggcgaataatatgcagcttggtcttggaggaggagggatcatgcttgacgggtcgggttgggatcatccgggtatgggtttgggtttgaggagaaccgaaccgggtaataataataataacccatggaccgatctggctatgaacagagcggagaaaaactga

SEQ ID NO: 35 - DNA, 1095 bp, Arabidopsis thaliana
atgttttcaagatttgtcctaaaaagttggagacctaaaacccaaaccacatctctcaattcaatcaaaggttttagctttagctctagctcgataaaccctaaacccaaaatccgagtaggggtttggtgggatctagacaacaaaccaccagcctctttcccgccttacgacgccgccgtcaagctccgaaccgccgcgtcgtctttcggaaccgtgaagctaatgatggcgtatgcgaatcgtcacgcctttagctacgttcctttagaagttcgagaacagaggaaagataggaaattgctaaacaaattagagaacaaaggtttagttaaaccaccggagccttacttctgcggtgtttgtgaccggagattctacactaacgagaagctaattaatcatttcaagcagattcatgagacagagaatcagaaacgtatgagacagattgaatcttcgaaaggacatcgaagagtgagacttgtggctaagtattcgatgaagattgagaagtataaaagagcggcgaggaatgttttgactccgaaggaaggttacggtttagctgatgagctgaaacgagctggtttttgggtgaagatggttagtgataagccagatgctgctgataaggcgttgaaggaacatttggttgaagtgatggataagagagaagtggagtgtgttgttttagtgtctgatgattctgattttgcggggattttgtgggaagctaaggagaggtgtttgaggacggttgtgattggagattcgaacgaaggtgcgctgaagcgagtagcggatgttgcgtattcgtggaaggaagtgacgatggggaaggcgaagaaggaagttgagaaagttgtggggaagtggaaggatagagatgtgttgaagaagttggagtggacttatgatcctgctttggagaaagagagaggtggttcttgcggtgtttgggattacgagtttgattatgatgatgagattgagaatggaacagaggtggaacctgtggagattggtgatggtgttgactggtggaagatcgatactgaagatggtgttggatcttcaagaacttgtcgataa

SEQ ID NO: 36 - DNA, 963 bp, Arabidopsis thaliana
atgtcaaacccgacccgtaagaatatggagaggattaaaggtccatggagtccagaagaagatgatctgttgcagaggcttgttcagaaacatggtccgaggaactggtctttgattagcaaatcaatccctggacgttccggcaaatcttgtcgtctccggtggtgtaaccagctatctccggaggtagagcaccgtgctttttcgcaggaagaagacgagacgattattcgagctcacgctcggtttggtaacaagtgggctacgatctctcgtcttctcaatggacgaaccgataacgctatcaagaatcattggaactcgacgctgaagcgaaaatgcagcgtcgaagggcaaagttgtgattttggtggtaatggagggtatgatggtaatttaggagaagagcaaccgttgaaacgtacggcgagtggtggtggtggtgtctcgactggcttgtatatgagtcccggaagtccatcgggatctgacgtcagcgagcaatctagtggtggtgcacacgtgtttaaaccaacggttagatctgaggttacagcgtcatcgtctggtgaagatcctccaacttatcttagtttgtctcttccttggactgacgagacggttcgagtcaacgagccggttcaacttaaccagaatacggttatggacggtggttatacggcggagctgtttccggttagaaaggaagagcaagtggaagtagaagaagaagaagcgaaggggatatctggtggattcggtggtgagttcatgacggtggttcaggagatgataaggacggaggtgaggagttacatggcggatttacagcgaggaaacgtcggtggtagtagttctggcggcggaggtggcggttcgtgtatgccacaaagtgtaaacagccgtcgtgttgggtttagagagtttatagtgaaccaaatcggaattgggaagatggagtag

SEQ ID NO: 37 - DNA, 972 bp, Arabidopsis thaliana
atggaccgacgtaaccctttccaacatcaccaccaccaccatcagcttcatcatcacttgatccaacagcaacagcttcctccgccgccgctgagcaccacggcgacgatggatcccggcggaggaggaggaggtggggagagaatcccacagtggagcatagaggagacaaaggagcttttggctataagagaagaacttgatcaaactttcatggagaccaaacgtaataagcttctttgggaagtcgtggctgctaagatggccgacaagggttttgtccgaagcgcagaacaatgtaagagcaagtggaagaacctcgtcactagatacaaggcgtgtgagaccactgagccagatgctattaggcagcagttcccattctacaatgagattcagtcgatttttgaagcaagaatgcaaagaatgctgtggtcagaagccacagaaccaagcacttcctcgaagagaaaacatcatcaattttcatctgatgatgaagaagaagaagttgacgaaccaaatcaagatatcaacgaggaattattgtctttagtagagacacagaaaagagagacagaagtgattactactagtacttcgaccaatccaagaaaacgtgcaaaaaaaggaaaaggcgttgcgagtggtacgaaagctgaaactgcgggtaatacactaaaagatatattggaggagtttatgaggcaaacggtgaagatggaaaaggaatggagagatgcatgggagatgaaggagatagagagggagaagagagagaaagagtggcggaggagaatggcggagctagaggaggaaagagccgccacagaaaggaggtggatggagagagaggaagagagacggttgagagaagaagctagggctcagaagagagattctctcatcgatgctttgcttaataggcttaatagagatcataatgatgatcatcataatcaaggtttctaa

SEQ ID NO: 38 - DNA, 1647 bp, Arabidopsis thaliana
atgagctcaagttcgaatccaccggtttgttcaccggaaaaggaggaaagaagtgaaatgaaaattgagattcaatgtatggagaataagcaaccattagctgcttcttgctcttctgcatccgaaggtagtggctgtttcttcctcaagtcacctgaaatcgcaactcctgccacagtatcttcatttcctcggaggactagtggacctatgagacgagcaaaaggtggttggactccagaggaggatgagacacttagacgagcagttgaaaagtataaggggaagaggtggaagaaaatagcggaatttttcccagagagaacagaagtccaatgcttgcacaggtggcagaaagttcttaatccagagcttgttaaaggaccttggactcaagaggaggatgataaaatcgttgaacttgtaaaaaaatatggacctgccaaatggtctgtcatcgccaagtccttaccaggtcgtattgggaaacaatgtcgagaaaggtggcacaaccatttaaatcctggtattagaaaggatgcttggaccgtagaagaagaatcagctctcatgaattctcatcgaatgtacggaaacaaatgggcggaaattgctaaggttttaccaggaaggactgataacgccataaagaaccattggaatagttcactgaagaaaaaattagagttctacttagcaactggtaacttgccaccgccagcaagcaaattcatcgttctgaaagatattgctgatggagacagagattccaagcagtctagtgcaactaaacctttcaaggattctgattcgcttacccaaacctcttcaggaaatacagattcaaatgaagttggaagagaccattttgactcttcttccgctctgcttgaagaagtagctgcttcacgaagaatcggtgtcaatgagtatgcttgctctcctgttgagtacaagcctcagttgcctaatctggaaccaatttcagaggaagtcagaatcaactcaaaagcttattttgagagatcaatccagaggaaagtagaaaacgggtttggaactccaaagcatgggaatttatactataagtctccacttgactattactttccatcagaagcggatctgcaacatatgtacggatatgaatgtggttgcagtcccggtgctgcatcaccagtcagcttaatgactacaccctgtaataaagacagtggtttaactgcaacgagaagtcctgaatctttcttgagagaagctgctaggacttttccaaacacaccttctatttttaggaaaaggcgaaaggttgttttggcagcgaaaacagatgctgttgttgttgttaatggtgtagttaaggaagttgatcgaaaagaagaaagtaaagatatgagaaaaagtttgttgctggagacaactgataattgcagtgatgatgaagaactcgggttaaatggaaatgctttcaatttgtctccaccatatcggttaagagctaaaagaacagctgtaatcaaatcaagacagcttgagtttacatctgaaaaggagaagcagccagataatgagattgagtttacatctgcaaaagagaagcagcctgataatgaaattaaaacgtctgaggaagacaagcctgtgtag

SEQ ID NO: 39 - DNA, 551 bp, Arabidopsis thaliana
ttaattaaaaacaaatgggtcggagaaagatcaagatggagatggttcaggacatgaacacacgacaggttaccttttcaaaacggaggactggtttgttcaagaaggcgagcgagttagccacgctctgcaacgctgagttgggcatcgttgtcttttcaccaggaggcaagcctttctcctacgggaaaccgaatcttgattctgttgcagagcgattcatgagagaatatgatgattcagacagtggcgatgaagaaaaaagtggtaattacaggcctaaactgaagaggctgagtgaacgtctcgatttgctcaaccaagaggttgaagctgagaaggaacgaggcgagaagagtcaggagaagcttgaatctgctggggatgagagattcaaggagtccattgagacgcttaccctcgatgaactcaatgaatacaaagataggcttcagacagtccatggtaggattgaaggtcaagtcaatcacttgcaggcttcgtcttgcctcatgcttctctccagaaaatagctagaccgacggcgcgcc

SEQ ID NO: 40 - DNA, 1545 bp, Arabidopsis thaliana
ggccgaataaaaaacatcattcggcaagttcatcgatccacgaaaaaaaagaaacgatgaggcttaatggggattcgggtccgggtcaggatgaacccggttcgagcgggtttcacggcggaatcagacgattcccgttagcagctcagccggagattatgagagctgctgagaaagacgatcaatacgcttctttcatccacgaagcttgccgcgatgccttccgacaccttttcggtacaagaatcgctcttgcttaccagaaggagatgaagctacttggacagatgctttactatgttcttacgacaggttcagggcaacaaactttaggagaggaatattgtgacattatacaggttgcagggccttatggactctctcctacaccagctagacgtgctttgttcatattgtaccagaccgcagttccatatatcgcagagagaattagcactcgagctgctacgcaagcagtcacctttgatgagtctgatgagttttttggtgatagtcatatccactcaccaagaatgatagatcttccatcttcatctcaagttgaaacttcaacttctgtagtatctaggttaaacgatagacttatgagatcgtggcaccgagctattcagcgatggcctgtggttcttcctgttgcccgcgaagtcttacaactggttttgcgtgccaatctgatgctcttctactttgaaggtttttattatcatatatcgaaacgtgcatccggggttcgttatgttttcataggaaagcaactgaatcagagacctagataccaaattcttggggttttccttctaatccaattgtgcatccttgctgctgagggcttgcgtcggagtaatttgtcatctatcactagctccattcagcaggcttctataggatcttatcaaacttcaggagggagaggtttacctgttttaaatgaagaggggaatttgataacttcggaagctgaaaagggaaactggtctacctccgattcaacttcaacggaggcagtagggaaatgcactctctgcttaagcacccgtcagcacccaacggccactccttgtggtcatgtgttttgttggagctgcattatggaatggtgcaacgagaagcaagaatgccctctttgtcgaacgcccaatacccattcaagtttggtttgtttgtatcattctgatttttaggcacaatgggatcaacaaagacaggcactgcagaaaggcaaagcagctaagacagtgacacctaaggacagtgcatctgctacaggaatggaatctgcttcggcttcagactttttgagtaagatcaacaagttatgagagaagacagaataaatatatttctgacatcattctcgatcccatgcctacctttttctctatgatatttagtgcagaaaccacagaggtttgttgttttacatttcattaaaaagagttggagatgttaggtggtctttcacattctatattacatataataatctcaattggagatctattacaagacaaaaaaaaaaaaaaa

SEQ ID NO: 41 - DNA, 471 bp, Arabidopsis thaliana
atgatgtctactatttccccggttttctcaaccgaaccgggtctattaacctctgtcctcccagcttttgaaaccagtttcactccatgggacatttcacacctcttctcggtcttcgattcattaatcgatccaaaaccggtttcgacccatgactatggttcagtaaaccagatcggttcagacatgtctccgaccgacaataccgacgagcggaaaaagaaacggaaattatcgaaccgggaatcggctaagcggtcaagagagaagaaacaaaagcacttggaggagatgagtatccagctaaaccaactcaaaattcagaaccaagaattgaagaaccagcttcggtacgttttataccattgtcaacgaacgaagatggaaaatgatcgtctacttatggagcaccgtatactgcatgataagttgttgaacatcagacaagttttgatgtttcgtcaaacctaa

SEQ ID NO: 42 - DNA, 1458 bp, Arabidopsis thaliana
atggatttaagtgcgaaagatgagttttcagcagagaagaggaatcctgataactatgattctgttaataatccgtctggagattggcgagttgattcatatccttcagagaatctgatttcagctggtcctgcgtcttgttctccttctcagatgatggattcatttgggcaaactctttggtatgatcccacgagtgttcaggctgttggttatgccggttttaatggtggtaatgcttcgtcttcttcgtttaggggtagtattgatagatctcttgaaatgggttggaatctgcctaatttgttgcctcctaaaggcaatggtcttttcttaccgaatgcgagtagtttccttcctccgagtatggctcagttcccggctgattcaggttttatagagcgtgcagcgaggttttcgctctttagcggtgggaattttagtgatatggtgaatcaaccacttgggaattctgaggctattggtttgtttcttcaaggtggtggaacaatgcaagggcagtgtcaaagtaatgaacttaatgttggtgaacctcacaatgatgtatctgtagcagtgaaagaatcaactgttagatctagtgaacaagctaaaccgaatgttcctggatcgggcaatgtatccgaggatactcagtctagtggtggtaatggtcagaaaggcagagaaacctcttccaacacaaagaagaggaaaagaaatgggcagaactctgaagcagctcaatcacacagatcccagcagtctgaggaagaaccagacaacaatggtgatgaaaagcgcaatgatgagcaaagtccaaattcacctggaaagaagtcaaacagtgggaaacaacagggcaaacaaagttctgatcctccaaaagatggatatattcatgtacgggcacgaagaggccaggccacaaatagccatagtcttgcagaaagagttaggagagaaaaaattagtgaaaggatgaagtttcttcaagatctagtaccgggttgcaacaaggtgactgggaaggcagttatgcttgacgaaatcataaactacgtacaatcactacaacgccaagttgagtttttatcgatgaaacttgcaactgtgaacccacaaatggactttaaccttgaaggtcttcttgcaaaagatgcacttcaactacgagctggttcttcatctacaacaccattcccaccaaatatgtcaatggcttatcctcctctacctcatggattcatgcaacaaactctttccagcattggaaggaccattacctctccattgtctcctatgaatggtggattcaagcgacaggaaacaaatggatgggagggtgatttgcaaaatgtgatccacattaactatggagctggtgatgtcacacctgaccctcaagcagcagctacagcatctcttccagctgcaaatatgaaggttgagccatga

SEQ ID NO: 43 - DNA, 1660 bp, Arabidopsis thaliana
ttaattaaatgaagagaggatacggagaaacatgggatccgccaccaaaaccactaccagcttctcgttccggagaaggtccttcaatggcggataagaagaaggctgatgatgacaacaacaacagcaacatggatgatgagcttcttgctgttcttggctacaaggttcgatcttctgagatggctgaagtagcacagaagcttgaacaacttgagatggtcttgtctaatgatgatgttggttctactgtcttaaacgactctgttcattataacccatctgatctctctaactgggtcgagagcatgctttctgagctgaacaacccggcttcttcggatcttgacacgacccgaagttgtgtggatagatccgaatacgatctcagagcaattccgggtctttctgcgtttccaaaggaagaggaagtctttgacgaggaagctagcagcaagaggatccgactcggatcgtggtgcgaatcgtcggacgagtcaactcggtccgtggtgctcgttgactctcaggagaccggagttagacttgtccacgcactagtggcgtgcgctgaggcgattcaccaggagaatctcaacttagctgacgcgctggtgaaacgcgtgggaacactcgcgggttctcaagctggagctatgggaaaagtcgctacgtattttgctcaagccttggctcgtcgtatttaccgtgattacacggcggagacggacgtttgcgcggcggtgaacccatctttcgaagaggttttggagatgcacttttacgagtcttgcccttacctgaagttcgctcatttcacggcgaaccaagcgattctagaagctgttacgacggcgcgtagagttcacgtcattgatttagggcttaatcaagggatgcaatggcctgctttaatgcaagctttagctctccgacccggtggacctccgtcgtttcgtctcaccggaatcggaccaccgcagacggagaattcagattcgcttcaacagttaggttggaaattagctcaattcgctcagaacatgggcgttgaattcgaattcaaaggcttagccgctgagagtttatcggatcttgaacccgaaatgttcgaaacccgacccgaatctgaaaccttagtggttaattcggtatttgagctccaccggttattagcccgatccggttcaatcgaaaagcttctcaatacggttaaagctattaaaccgagtatcgtaacggtggttgagcaagaagcgaaccacaacggaatcgtcttcctcgataggttcaacgaagcgcttcattactactcgagcttgtttgactcgctcgaagacagttatagtttaccgagtcaagaccgagttatgtcagaagtgtacttagggagacagatactcaacgttgttgcggcggaagggtccgatcgggtcgagcggcacgagacggctgcacagtggaggattcggatgaaatccgctgggtttgacccgattcatctcggatctagcgcgtttaaacaagcgagtatgcttttatcgctttacgctaccggagatggatacagagttgaagaaaatgacggatgtttaatgatagggtggcagacgcgaccactcatcacaacctcggcgtggaaactcgcctgaggcgcgcc

SEQ ID NO: 44 - DNA, 1032 bp, Arabidopsis thaliana
ttaattaaaatgagagaagacgattcagactggttcgcaagatgggaagaagaacttccatcaccagaagagctcatgccaatatcacaatctctaatctcacccgatctagctctagccttcgatatacgaaccccaaatcacggaaacggaaactcaaaccaacctcatcatcatcatcatcaccaaaccacacctcctacaccgtctcagcttcagcttccatcttctcaagccaattcctcagccgaattcgctgcagattcagcagatctaggctccggaggagctgccggagacgaaccagctcggactttaaaacgacctcgtcttgtctggacaccgcagctgcataaacgtttcgttgatgctgttgcgcatttagggattaagaacgcagttcctaaaacgattatgcagcttatgagtgttgatggtttaactagagaaaacgttgcgagtcatttgcaaaagtatagactttatcttaagagaatgcaaggtttgtcttctggtggtggtgctggttcagatccagctactgatcgtcttttcgctagctctcctgttcctgctcactttcttcatcctaatcgtgttcccagttctgatcatttcatgccgtcttttgttcctattgctactcttcaacaacaacaacaaatggctgctgctgcggccgctgctgcagcagctaatcctcatttacaaccgcctcagttccaccgtcaaatcgcagctgcgcattttggttcaccgactaatggtggattcagttcaccgacgagtaatggacagtttggatcaccgactagtaatggatttggatcaccgacgactaatgggaagtttgatccttcgttcttggcggtgaggcaaacgcagcagcaaccaattcagagaatgtctacaccatcattgcatagtccagttagtaattacgttgaggatttggaatctgcaaacgctaatggagggagaactgtcttaactttattcccaactcgagacgattaaaaagtcaggcgcgcc

SEQ ID NO: 45 - DNA, 1549 bp, Arabidopsis thaliana
ttaattaaatgttgttggaagaaacagaaccaccaaaccagactctagatcatgtcctaagctggcttgaggattctgtgtccttatccccattaccaggatttgatgattcttatttgctccacgagtttgatgggtctcaaacgtgggaatgggatcagactcaagatccggagcatggttttattcaaagctatagtcaagatcttagtgcagcatatgttggttgtgaagcaactaacctggaagtggtaacagaagctccatccattgatttggatcttccacctgaaattcagcaaccaaacgatcagtccaggaaaaggagccacgacgggtttctcgaggcacaacaggtgaaaaaatcggcaaggagcaagagaaaagcaatcaagtctagtgagaagagctccaaagatggtaacaaggaagggagatgggcagagaagttgcttaacccttgtgccttggccattacggcaagtaactcatcaagggttcaacattacctttgtgttctctctgaactggcctcttcttctggtgatgctaatcgtcggcttgcagcttttggtcttcgggctttgcaacatcatctttcctcatcctctgtgtcatcatccttttggcctgtttttacttttgcttcagcggaagtgaagatgtttcaaaagactctgcttaagttctacgaggtaagcccttggtttgctttgcctaacaacatggcaaactcagctatcctgcagattttagcacaggatcccaaagataaaaaggatcttcatattattgatattggtgtttctcacggtatgcaatggcccactttgttggaggctctgagctgcagactagaaggacctcctcctcgtgttcgaataaccgttatatcagatctaaccgcagacatacctttctctgttggtccaccaggttacaattatggttctcaactcctaggctttgctcggtctctcaagatcaaccttcagattagtgtacttgacaagttacaactcattgatacctcacctcacgagaacttaatcgtgtgtgctcagtttaggctgcatcacctgaagcatagcatcaatgatgagagaggcgagactttgaaagcagtgagaagtttaaggccaaaaggagtggttctttgtgagaacaatggagaatgcagtagtagtgcggactttgcagcaggattctcgaagaaactggagtatgtatggaagtttctggattcaacaagctcgggatttaaagaagagaatagcgaagagagaaaactaatggaaggagaggcaacaaaggtgttgatgaatgcaggagatatgaatgaaggaaaagagaaatggtatgagaggatgagagaagctggtttttttgtagaagcatttgaagaagatgcagttgatggagccaaatccttactaagaaagtatgacaacaattgggaaataagaatggaagatggagatacctttgctggattaatgtggaaaggagaggcagtttccttttgttcattgtggaagtagggcgcgcc

SEQ ID NO: 46 - DNA, 1324 bp, Arabidopsis thaliana
ttaattaaatgaaggacgcagagaagcgagaggtgattgcatcatcatcattacaaagaaagagaaacagaggaagaagactaaggaaaagaagaagaagaaacgagaagcgagtactaatggttccatcatcattaccaaacgacgtgctagaggagatctttttaagatttccggttaaagccctaatccgactcaagtctctctcgaaacaatggagatcgacgatcgaatctcgcagttttgaagagagacacttgacgatcgctaagaaagccttcgtggatcatcccaaggtcatgctcgtaggagaagaagatcccataagaggaaccgggattcgtccagacactgacattggttttaggttattctgcttggaatcggcttctcttctatcctttactcgtctcaatttccctcaagggttcttcaactggatctacatatctgaaagctgtgatggccttttctgcatccattccccaaaatcacattccgtatatgtagtgaatccggctacacggtggctccgcctacttcctccggcagggtttcagattttgatccacaagtttaaccccactgaacgtgagtggaatgtagtgatgaaatcaatctttcatctagcattcgtgaaggccaccgattacaaattagtgtggttgtacaattgtgataagtacattgttgatgcgtcgagtccaaacgtgggagtcacaaagtgcgagatttttgactttaggaaaaatgcttggaggtacttggcttgcactccaagtcatcagatattctattaccaaaagccagcatctgcaaacgggtcggtttattggtttacagaaccatataatgaaagaatcgaagtagtggcttttgatattcagaccgaaacattccggttgctgcctaagattaatccggctattgctggttcagatcctcaccatattgacatgtgcactctggataatagtttgtgtatgtcgaaaagggagaaagatactatgatccaagatatttggaggttgaaaccatcagaagacacatgggaaaagatttttagcatagacttggtttcctgtccttcttctcggactgagaagcgtgatcaatttgattggagcaagaaggatagggttgagccagccacacccgtcgcggtttgtaagaataagaagatccttctctcacatcgctattcccgaggtttggtaaagtacgatcccctaacaaaatctatcgattttttttccggacatcctaccgcttacagaaaagttatttattttcaaagtttgatatctcatctataaggcgcgcc

SEQ ID NO: 47 - DNA, 1705 bp, Arabidopsis thaliana
ttaattaatgggtctccctttcttctattcattttcttattcattaaaaaaaaaaaatggatactctctttagactagtcagtctccaacaacaacaacaatccgatagtatcattacaaatcaatcttcgttaagcagaacttccaccaccactactggctctccacaaactgcttatcactacaactttccacaaaacgacgtcgtcgaagaatgcttcaactttttcatggatgaagaagacctttcctcttcttcttctcaccacaaccatcacaaccacaacaatcctaatacttactactctcctttcactactcccacccaataccatcccgccacatcatcaaccccttcctccaccgccgcagccgcagctttagcctcgccttactcctcctccggccaccataatgacccttccgcgttctccatacctcaaactcctccgtccttcgacttctcagccaatgccaagtgggcagactcggtccttcttgaagcggcacgtgccttctccgacaaagacactgcacgtgcgcaacaaatcctatggacgctcaacgagctctcttctccgtacggagacaccgagcaaaaactggcttcttacttcctccaagctctcttcaaccgcatgaccggttcaggcgaacgatgctaccgaaccatggtaacagctgcagccacagagaagacttgctccttcgagtcaacgcgaaaaactgtactaaagttccaagaagttagcccctgggccacgtttggacacgtggcggcaaacggagcaatcttggaagcagtagacggagaggcaaagatccacatcgttgacataagctccacgttttgcactcaatggccgactcttctagaagctttagccacaagatcagacgacacgcctcacctaaggctaaccacagttgtcgtggccaacaagtttgtcaacgatcaaacggcgtcgcatcggatgatgaaagagatcggaaaccgaatggagaaattcgctaggcttatgggagttcctttcaaatttaacattattcatcacgttggagatttatctgagtttgatctcaacgaactcgacgttaaaccagacgaagtcttggccattaactgcgtaggcgcgatgcatgggatcgcttcacgtggaagccctagagacgctgtgatatcgagtttccgacggttaagaccgaggattgtgacggtcgtagaagaagaagctgatcttgtcggagaagaagaaggtggctttgatgatgagttcttgagagggtttggagaatgtttacgatggtttagggtttgcttcgagtcatgggaagagagttttccaaggacgagcaacgagaggttgatgctagagcgtgcagcgggacgtgcgatcgttgatcttgtggcttgtgagccgtcggattccacggagaggcgagagacagcgaggaagtggtcgaggaggatgaggaatagtgggtttggagcggtggggtatagtgatgaggtggcggatgatgtcagagctttgttgaggagatataaagaaggtgtttggtcgatggtacagtgtcctgatgccgccggaatattcctttgttggagagatcagccggtggtttgggctagtgcgtggcggccaacgtaaagggttgtttttattttttcataaggaattcgcaagttcgattttggcgcgcc

SEQ ID NO: 48 - DNA, 831 bp, Arabidopsis thaliana
ttaattaaatgaactcttgccaacaaaaggctatggagaagttgcttcacgggcatgggtgcgccaaccagctgctcatcatggaccagaccgagtcagactcgtccatggaaagggaggatttggccaagtccgtcctccattgtttctcagatgcgctctccatcttgatcgatactaatgaccaccaagacgatcaatccaataactcatctcctcaggactcttctcctgtgcttgagagctccaggaaaccacttcacaagaggggaagaaagacatctatggcagagagctcagactaccatagacacgaatcttcaaccccgatctaccacgacggcttcctctggaggaaatacggacaaaagcagatcaaagaatctgagtaccaaaggagttactacaagtgtgcctacaccaaggaccagaactgtgaagcaaagaagcaggttcaaaagatccaacacaatcctccattgtactcaaccacttacttcggccagcacatatgccagcttcatcaagcttatgcaactttccccattgacacatctgacttcgaagagcacgagggatcccacatgatccgattcggtcaccccaacatcagcttctcctcctccacctctaacctccgccaacatcagaatcatcaggatcgcatcaaagatgaatacatgaaaccggtgatagcagaagattggtctccatcccagtggatgtcgtccgaggttgccctcgccgtggaggctttcgagtttaatcctttctggacatctcacgacttatcatcatgacactatatccctcagctctatcaggcgcgcc

SEQ ID NO: 49 - DNA, 1279 bp, Arabidopsis thaliana
ttaattaagcagagtatttaagtaattttggggaattagtgagaaaatggaggagaaaggtgaaataagtccaagtggggtcgtcacagttaagggagatgaagctttggttccaagaacagagtttcaacaaaaccctagttttctccaattcgtgagtcccacaacggtagtgactcctctccctcctccaccagctccgtcttcggctccggtaccaaccaccgtgactcctggctcagccacagcatcaaccggatcagatccgacgaaaaagaagagaggaagaccgaggaagtacgcaccagacggaagcctgaaccctaggtttttgcgaccaactctgtctccaactccaatctcatcttcgattccattgtctggagattatcaatggaaacgaggcaaagctcagcagcagcatcagcctcttgagttcgtcaagaaatctcacaaattcgagtatggaagcccagctcctactcctcctcttcctgggctctcatgctatgtgggtgcaaattttacgacccatcaatttactgtcaatggcggtgaggatgtgacaatgaaggttatgccgtattcgcaacaaggatctcgagctatctgcattctttctgcaactggttcgatctctaatgtcactcttggtcaacctaccaatgcaggtggcactcttacatatgagggtcggtttgagatactatcgctatctggttcctttatgcctactgaaaatggaggaacaaaaggtcgggctggtgggatgagcatttctttagccggaccaaatggcaatatatttggtggtggccttgccggtatgcttatagcagctggtcctgttcaggtggtaatgggaagtttcattgtgatgcatcaagcagaacaaaatcagaagaagaaacctagagttatggaggcttttgctccaccacaaccacaagcaccaccacaactgcaacaacaacaacctcctacttttaccataacaaccgtgaattcaacttctccttcggtgaacaccgtagaggagcagaaaccacaagcttatggtggtggtatagtgagaccgatggctcaaatgccttcttctttccaaaacgacaattcaactatgaacaatttcacaccggcctatcatggatacgggaatatgaacactggtactactcacaaagaagaacatgaagacgaagatggtggtgatgatgatgatgattcaggcgatactaggagccaatctcatagtggttgagcaattctctggcgcgcc

SEQ ID NO: 50 - DNA, 1995 bp, Arabidopsis thaliana
ttaattaagatgttggcaggttgttcgagttcatcattgttgtcgcctactcgaagattgaggagtgaagcagtagcagcaacatcagcaacagtatcagcgcattttcccatgaacacacagagattggacttaccatgcagtagtagcttctctcgcaaggaaactccttctagcagaccacttggaagaagcatctctcttgacaacagcaacaacaacaacaacaaaccgatcgagcgcaagacgaagaccagtggttgttcgcttaaacagaacataaagcttccacctttggcaacaacaagaggaaatggagaagggttttcttggaacaacgacaacaacaacagagggaagagtttgaagagattagctgaggaggacgagtcttgtttgagcagagcgaagaggacaaaatgcgaaaacgaaggtggtttctggtttgagcatttcactggccaggattcttcttcaccagcattacctttttctttgacttgttcaggtgatgatgaggaaaaggtttgctttgtgccaagtgaagtcatttctcagcctttaccaaactgggttgattcggtgattacggagctagctggtataggcgataaggacgttgagagtagccttcctgcagcagttaaggaagcatctggaggatcatctacaagcgcatcatccgagagtcgtagcttaagccatagagtaccagaacctacaaatggctcaaggaatccgtactcacaccgcggtgcaacagaggaaaggaccaccggaaacatcaacaacaacaacaacaggaacgatttgcagagggatttcgagcttgtcaatttgcttacgggatgcttagacgcgatcagatcaagaaacatagcagcgattaaccatttcattgcaagaaccggtgatcttgcttctcctagaggaagaacaccaatgactcgcctcatagcttactacattgaagctttggctctaagagtggcgcgtatgtggcctcacatcttccacatcgcaccccctcgtgaattcgatagaactgtcgaagatgaatcaggaaatgcattgaggttcttgaatcaagtaaccccaattccaaagttcattcatttcacagccaacgagatgttactcagagcatttgaagggaaagagagagttcacattattgacttcgacatcaagcaaggtttacagtggcctagcttcttccaaagcttagcttcgagaataaatccaccacaccatgtacgaatcactgggatcggagaatcgaaacttgagctaaacgaaaccggagatcgcctccacggatttgcagaggcgatgaatcttcaattcgagtttcatcctgtagttgatagactcgaagacgttagactatggatgcttcacgtcaaagaaggtgaatcagtagctgtaaactgtgtcatgcagatgcacaagacactctacgatggaaccggagcagcaattagggattttttgggtttaatcagaagcacaaacccaatagctctcgttcttgcggagcaagaagcagaacacaactcagagcaacttgagacacgagtttgtaactcgctaaagtactattcagctatgtttgatgcaattcacacgaatcttgctacagatagcttaatgagagtcaaagttgaggagatgttgtttgggagagagatcaggaacattgttgcgtgtgaaggaagtcatagacaagagaggcatgtgggttttcgtcattggaggaggatgttggagcagttagggtttcggagtcttggagtctcggagagagaggttttgcagagtaagatgttgcttaggatgtacggatctgataatgaagggtttttcaatgtggagaggagcgatgaagacaacggcggtgaaggcggacgcggcggtggagttactttacggtggtcggagcagccactttatacgatctcggcttggactaccggagggaattaaaggcgcgcc

SEQ ID NO: 51 - DNA, 1512 bp, Arabidopsis thaliana
ttaattaaatggaagaccgacgccttgtccatggagctgcgccgccgttgacagccgtggagagattcttatacggtcaaaagaatgatgccttgtgttccaagaaacaagagagttctagagaccaaccgatcgtgaagacaaaaatatcgattgagactagaagcgacaacaaagagaacacaacgtttgggccgacgagggagaaacacttggtccttaatggcggcaacagaaaccctactggagaagtggtcgctagaagtgcagccagagattatcaaaacagtacgaagaaacgatcatccaagaacctcatcaaagggcaatggacggcggaagaagacaggtatatatagataaaatgttttattgcatctatacaagagtcaaaatatttagtatatgcgtttgttaatacaaacatatatgtatatatatataggaagttgataaggttggtgaggcaacatggggagaggaaatgggcaatgatatcggagaaacttgagggaagagcaggcaaacaatgtcgtgagagatggcataatcatctccgtcctgatattaaggtttctttttagatctctcttcacataacatatagttttttctagatctagggttctgacataagtccctcgatatctacgtttctgccaaaacaaaaaaaaaatcagaaagatggatggagtgaagaagaagagagggttcttgtggaatcacacatgagaatcgggaacaaatgggcagagatcgctaaactcataccaggacggactgagaattctatcaagaaccattggaatgcgaccaagagacgtcaaaattcaaaacgcaaacacaaacgcgaatcaaacgctgataacaatgatagagatgcctctccatcagctaaaagaccatgcattctccaagactacatcaaaagtatcgagagaaataacattaacaaggacaatgacgagaagaagaatgagaacaccatcagtgttatttctacacctaatcttgatcagatctattctgatggtgattccgcgtcgtccatccttggcggtccatatgacgaagagctagattactttcaaaatatctttgcaaaccatccgatttctcttgagaatttaggtttgagccaaacttcggatgaggtaactcagtcttcatcatctgggttcatgatcaagaaccctaaccctaacttgcacgacagtgttggaattcatcatcaagaggcaacgatcacagctccggcgaatacaccccaccttgcgtctgatatctacttatcttatttattgaacggtacgacgtcttcatactccgacactcattttccgtcttcctcatcttccacgtcatccaccaccgtagagcatggaggccacaacgagtttcttgagcctcaagctaactctacaagtgaaagaagagaaatggatctgatagagatgctctctggttctattcaaggtagcaacatctgcttcccgttggtctagggcgcgc

SEQ ID NO: 52 - DNA, 1163 bp, Glycine max
ttaattaaaagcaactggttgtgggatttgcacttggaaatgaaggataggcaacgttggagagctgaagaggatgctttactacgcgcatatgtcaaacagtatggtcctagggaatggaatctggtgtctcagcgcatgaacacacctcttaacagggatgccaagtcatgcttagaaaggtggaagaactacctcaagcccggcattaagaaaggatctcttacagaggaagagcagcgtctagtcatcaaccttcaagcaacacacggcaacaagtggaagaaaattgcagcacaagtccctggtcgcacagcaaagaggttagggaagtggtgggaagtgttcaaagagaagcagcaaagggaaacaaaggggaataactgcaccattgacccaattaacgatagcaagtacgagcatatccttgagagttttgcagagaagctagtgaaagaaaggccttcaacatcaacatcaacatcatttgttatggctacttccaacagttcttttctgcatgctgatgcaccggctcctgcaccagccttgcttccgtcttggctttccaattccaatggcactgcacctgtgaggccaccctccccttctgtgactcttagtctttctccctcgacggtggcagcgcctcctccatggatgcagccccccgtcagaggacaggacaatgctagtcctcttgttttggggaatgtggcgcctcacggggctgttctagcatttggtgagaacatggtgatgtctgagctagtggagtgctgcaaggagttggatgaagtgcatcatgctttggccgggcataagaaggaggcagcatggcggttaagcagggtggagctgcagttggagtctgagaaggccgggcgaaggagggagaagatggaggaaatcgaagcgaaaatcaaagctctgagggaggagcaaacggctgcattggatagaattgaagcagaatatagggagcagttggcagggctgagaagagatgctgaaagcaaggagcaaaagttggctgaacaatgggctgcaaaacacttgcgacttactaagtttctagaacaggtagggtgcagatcaaggctcactgaaccaaatggaagatagagtgacatcaatcattcacaaattgggaaaatttaaat

SEQ ID NO: 53 - DNA, 870 bp, Glycine max
ttaattaatctctcccaaatcacactctcaattacaataacacacactcaacttgagaattttccccaaaaatcccaagagctcgcgccatggtttccccggaaaacagcaattggctgttcgattacccgttgatcgacgacgacgttattcccgtcggcgactcctccttcgccgtctccgcttccaccttctcctggcccccacctcccgccaatgtcagtgtcgaaattgatgcttcgcttggggattctgatggcctaaaaaatcctgctttgaagaaaaggactaaatctgattcaagtactgcttctagctccaaagcgtgtcgggagaagttgaggagggataggcttaatgacaagtttgttgaattgggctccatcttggagcccggaaggcctcccaaaacagacaaggcttccattctgattgatgctgcccgaatggtgacacagctgcgggatgaagccctgaagttgaaagactcaaatacgagtcttcaagagaagattaaagagttaaaggctgagaagaatgaacttcgtgatgagaaacagaggcttaaggcagagaaagagaagttggaggtgcaggtaaaatcaatgaatgctcaacctgctttcttgccaccccctcctgcaatccctgctgcatttgctccacaaggccaagcccctggcaacaagttggtgcctttcatcagctatccgggagttgccatgtggcaatttatgcctccggccgccgtggatacctcacaggatcatgtactccgtccaccggttgcctaagttggcattgtacaattatttgggcttccattttggctcaaaagttgtaatcattttcctatagctttatttaaat

SEQ ID NO: 54 - DNA, 779 bp, Glycine max
ttaattaatattacagattcacaagcgcagacacttcaaatggctctggaagctcttcaatcacccagaactgccactccatcgtttagtccctttgaagaaaccaacctcagttacttggagacaccgtggaccaaaggaaagcgttctaagcgtagccgcatggagcagcaactgcaacactcttcatgcaccgaggaagagtacctcgctctctgtctcatcatgctcgctcacggcggcgccggcggtgtccccgccgccaagcctgctgtctccgacaacaattccgcgccgctacccgccgccaaactgagctacaaatgttcggtctgcaacaaagccttctcctcttaccaagcactcggtggacacaaggccagccaccggaagctcggcggcgagcaccactcgacctcctccgccgtgacaacgagttcggcgtcgaacggcggtgctaggacccacgagtgctccatctgccaaaagacgttcccaacaggacaggccttgggaggacacaaacgttgtcactacgaaggcggtaacagcgccgtaaccgcctctgagggagtggggtccactcacacaggaagccaccgcgatttcgatctgaacctcccggcttttccggacttttcaacaaggttcttcgttgatgacgaggttaccagtcctcatccatccaagaaatcccgtctcaatttgaccatacccaagattgaaatccctcaatactgatgatccatagatccaaaaaatattcagtgtatttaaat

SEQ ID NO: 55 - DNA, 989 bp, Glycine max
ttaattaatttcacctttattacctttatcgaaggaaaaatgagcaacataagcatggtagaggcaaagctgccaccagggttcaggtttcatccaagagatgaagaacttgtgtgtgattacttgatgaagaaggtggcacacaatgattcccttctcatgataaacgttgaccttaacaagtgtgagccatgggatattcctgaaacagcttgtgtgggagggaaggagtggtatttctatacacaaagagaccgtaagtatgcaacagggctacgcacaaatcgtgccactgcttcagggtattggaaggccacagggaaggacaggtctatcctccgcaagggcacccttgtagggatgaggaagactttggtgttctatcaagggagggcacccaaaggaaataaaactgagtgggtcatgcatgagtttcgaattgaaggacctcatggacctccaaaaatttcttcttccaaggaagattgggttttgtgtagggtgttctacaaaaacagagaagtttcagccaaacctagaatgggtagctgctatgaggacacaggatcttcatctcttcctgcattaatggactcttacataagttttgaccaaactcaaacccatgcagatgagtttgagcaagtgccctgcttctccattttctctcagaaccaaacaagccccattttcaaccacatggccactatggagcctaagttacctgccaaccatgcaactaatgcatatggaggagcaccaaatttgggttattgcttagaccctttatcatgtgacagaaaaatgttaaaagctgttttgaatcagatcacaaagatggaaaggaatccacttaaccaaagcctaaaagggtcaccaagcttaggagaaggaagttcagagagttacttatctgaagtggggatgccccacatgtggaacaattactgatgtgggacttcagtccttaaaccctcttccatttaaat

SEQ ID NO: 56 - DNA, 946 bp, Glycine max
ttaattaactggaattgggtttggttgggggtaaagagaatgaagattcagtgtaacgtgtgtgaggctgcggaggccaaggttctgtgttgtgctgacgaggctgcgctgtgttgggagtgtgatgagaaggttcatgcggctaacaagcttgccagcaagcaccagagagtgcctctttctacctcttcctctcatatgcccaaatgtgacatttgtcaggaagcattaggctattttttctgtctagaagatcgggctctgctctgcagaaaatgtgatgtggcaatacacactgcaaatgcttatgtctctggtcatcagaggtttcttctcactggtgtaagagtaggccttgaagctatagaccctggtgcttccttaacttctttgaagtcagattctggggagaaagtttcagatacaaagtcttcttctgtctctagaaaggtttccacagtgccccagccatcaaattacaatgaagtgctacccattgaagttggaggagttggggagtttccaccagccaaggtgtcttttggtggtggttctacagatggaaatatctcacagtggactattgatgaatttattggcttaaacgagttcagtcagcattatgattacatggaaggatcatcaagggccgatggtggtaagcttggggattctgattctcctgttttaaagtctggtgaagaggatatggaggaggaggatgactatttggaacgtgttccagattcgtcgtggacagttcctcagatcccttccccacctactgcttctgggttatgctggccaaaagaccctcaatattcatctgatagtgttctgtttgttcctgacataagcttctctctcattcaacaatctcagattagtagtatttgtttgagacgctggaggcagctttaatttgtttactctttgctatttaaat

SEQ ID NO: 57 - DNA, 1079 bp, Glycine max
ttaattaaaacaacctagtattatttggacccggttcccatgacgcggcgttgctcgcattgcagccacaatgggcacaactcaagaacttgccctaaccgcggggtgaagctcttcggggtccgattaaccgatgggtcgatccggaagagtgctagcatgggcaatctaacccactatgccggttccgggtcgggtccactccataccgggttgaataaccccggttcgcccggggaaacccccgatcatgccgccgcagtcgccgacggttacttgtccgaggacttcgttcccgggtcttcttctagctcccgtgaaagaaagaagggtgttccatggactgaggaggaacatagaatgtttttactcggattgcagaagctgggcaaaggtgattggcgtggaattgcaaggacctatgttatatcaaggacacctactcaagtggctagccatgctcagaaatatttcatcaggcagagcaatgtgtccaggcggaaaagacggtccagcttgtttgatattgttgcagatgaagcagctgacactgcaatggtacagcaagacttcttgtctgctaatcagttacccactgaaacagaaggcaataaccccttgccagctcctcctcccctcgacgaagagtgcgaatccatggattccacaaactcaaatgatggagagcctgccccatcaaagccagaaaacacacagtcatcttatccaatgttatatcctgcatattattctccggtgttcccgtttcctctgccctattggtcaggatacagtccagagtccaccaagaaggaggagacacatgaagtactgaagccaactgcagttcattctaaaagccctatcaatgttgatgaactggttggcatttcaaaattgagtttaggggagtctattggtgactctggtccctcctctctgtctcgaaaacttatcgaagaaggaccctctagacagtcagcttttcatgcaacaccgacatgtggcagttcaaatggcagtgccatccatgcagtttaagcgtgtgcctcatgttccgaggaagggattatttaaat

SEQ ID NO: 58 - DNA, 1044 bp, Glycine max
ttaattaagtgtagctagcgagggagggatatagggggaagcgtttattcattcattaagatggcatcggagcttcaattgcccccaggcttcagattccatccaacggaccaggagctggtgttgcactatctctgccgtaaatgcgcgtcgcagcctatcgccgttcccatcatcgccgaaatcgacctctacaaatacgacccctgggacctacccggattggcttcctacggagagaaagagtggtacttcttttcaccacgggaccggaaatacccgaacggttccaggccgaaccgggcggcgggaaccggttactggaaggcaaccggggcggataagcccattggccaccccaaaccggttgggataaaaaaagctttggtgttttacgcagggaaagctccgaaaggggacaagagcaattggatcatgcacgagtatcgtctcgccgatgtagatcgctccgttcgcaaaaagaacagcctaaggttagatgattgggtgctttgccgtatttacaacaagaagggcacgatcgagaagttccaaccaagcagcgatgttgttgttagccgaaaaatggaatcatcggagatcgaagacaggaagccggagattctgaaaagcggaggaggttgtcttctgccgccggttccgccgccgcaagcgaaggcggcggtgaagacggattacatgtacttcgacccgtcggattcaatcccgaagctgcacacggactcgagctgttcggagcacgtggtatcgccggaattcgcgagcgaggtgcagagcgagccaaagtggaaggagtgggagaaaagcctcgagtttccgtttaattacgtggatgccactctgaacaacagcaacagcttcacgacgcaattccagggcaataatcagatgatgtcgccgctgcaggacatgttcatgtactggcccaacaagcccttctgaacaaaccgatccacgccgcccattcgcatttgcacggtagcacgagactcaaggtctatgagtgtgcctgtgcatttaaat

SEQ ID NO: 59 - DNA, 836 bp, Glycine max
ttaattaattgagcagcagcagcagagagagagaggcttatggaaggagtaccgcacccaatacccagaactgtcgaagaggttttcaccgattttaagggcagacgcgctggtttgattaaggccctcactactgacgttgaaaagttttaccagcagtgcgatcccgagaaggagaatttgtgtctatatgggtttccaaatgaaacatgggaagtgaatttgcctgttgaggaagtgcctcctgaacttcctgagccagcattaggtataaactttgccagggacggcatgcaagagaaggactggctatcactggttgcagttcacagtgactcatggctgcttgctgttgctttctattttggtgcccgctttggatttggtaagaatgaaaggaaaaggctttttcagatgataaatgatctgccaacaatcttcgaacttgtgacaggaagtgctaagcaatcaaaggatcaaccagctgctcacaacaatggtagcaaatgcaaatcaagtggaaagtcccatcagtctgagtctcaggccaaggggatgaagatgtctgcaccacccaaagaagaggatgagagtggagaagaagaagaagaagatgatgaacagggtgcaacatgtggtgcttgcggtgataattatggcactgatgaattctggatctgttgtgatatgtgtgaaagatggttccatggtaaatgtgttaaaattactcctgctaaggctgagcacatcaagcaatacaagtgccctagctgcagtaacaagagggttagagtttgaaagctctaaacctttggatcaatcaccaatatttaaat

SEQ ID NO: 60 - DNA, 864 bp, Glycine max
ttaattaatctgagcgtgagaaagagaaggggaagaaagagagagagtgatgggaaggggaagagtggagttgaagagaattgagaacaagatcaacaggcaagtgacctttgcaaaacgaaggaacgggcttttgaagaaagcttatgagctttccgttctttgtgatgccgaggttgctctcatcatcttctccaatagaggaaagcagtacgagttttgcagcggttcaagcatgctcaaaacgctggagaggtaccagaaatgcaactatggagcgcctgaggacaatgtggcaacaaaggaagccttggagttaagcagtcaacaagaatacttgaggctgaaagcacgttatgaagctctacaacgttctcaaaggaaccttatgggagaagatcttggccctctaagcagcaaagagcttgaatcacttgaaaggcagctagattcgtctttgaagcaaatcagatcaataaggacccaattcatgctggatcagctttctgatctacaacgtaaggaacactttctaggtgagtcaaacagagatctcagacaaaggttggaagagtttcaaataaatccactccaactgaatcccagtgctgaagatatggggtatggacgccatccaggtcagccccaaggccatgctctctttcaaccattggagtgtgagccaaccttgcaaattggatatcatcctgatccagtatcagtggtgacagaaggcccaagcatgaataattacatggcaggatggttaccatgaaagagtgtcaaatgtggagcataattaaagatcctgccgtttaatttcaaatttatttgaagttaaggaaaacggaaatttatttaaat

SEQ ID NO: 61 - DNA, 1406 bp, Glycine max
ttaattaacatacgaaccagttttgtgattgaagctgcgatggaggaggagacctccgatgcaatgaaccttgatttgaatctgggcccaggcccagagcccgaaactgggcccatgagcaatgaagctgtgaacttggacgattggataggggagcctcttcagagaattagcgaagctgtgaggagggcacggcaaaggtggagatggcgccaccttccgctaccgcatcctgaatttcatgctcactttccaactgaagctacccggcattttcaaataccacctgaggctcgtaatatctccgtggaattgaaccactttttggtcaattctggcaatggaagcgccttgcaggccggcgaagggagcgtggcggccgaggagagaatggaggaggtgccaaaggcgtgtgacaatgtcaatggtgtggcagaggatgagacttcacagaagaaggaggatgtagaaaagggtagtggcaatgatggggacttttttgattgtaacatctgtttggacctggctagggatcctgttgtaacttgttgtggtcatttgttttgttggccatgtttgtataggtggttgcatctgcattcggatgcgaaggaatgtccagtttgtaagggagaggtgacacttaaaagtgttaccccagtatatggccgtgggaacaatgtccgtggtcctgaggaggattctgctcttaagatccctcccaggccccaagcaaagagggttgagagtctgagacaaaccattcagagaaatgcatttgcactccctgttgaagagatgattcggcgtcttggaagcaggattgatcttacacgtgatttggttcagccgcctgaaccggatgctgcccgtgaaacggctgagagaactacttccttgctaagtaggttcttgactgcgcgagggatgcgtagagagcatcagaatctagtggcaccccccgaggatgtaatgggtttggcacagaacaatgttaatacttctgaggcaggggatccccggagtagggtgcagtcccatttgcttcgaagaacacaatcacatagagcaacactttctactctttcatcagcactaacttctgccgaaaggttagttgaggcatatttccgtagcaatccattaggtaggaaccaagaacaacctcctcctccagttgatgacagagattctttttcaagcattggtgctgttataaattcagagagtcagctggacactgctgtagagattgattccatggtatccttgtcaacatcctcgtctaggaggaggaatgatgcttcaagagtgtctgatgtggatagtggagattctcgtgctcctaggcgtagacgtttgaactgataaaagtcttatagatgttcaagttttactatttaaat

SEQ ID NO: 62 - DNA, 1027 bp, Glycine max
ttaattaaagagccaaaccccaaacaaaattgtcttctcttctatttctccaattacaactcgtttccctaactcggccgagtcatcatggcgaatcacccttccgaagctcccaccgacgacttcctggagcaaatcctgggcctctcgaccttcgcctccgccgaccccgccgccgacgcctctccgatgatgcttcagctcaactccggcgacgccgccacccacctcgccgccacccacctcgccgccttccacgcgccgccctaccagctcggcctcagcttggaccaaggtaagggaccattcctcacgcccgaggacgcttctggaagcggcaagcgcttccgcgacgacgtcgttgataccagacctaaaaacttttttcatggacaacccatgcctactactgttcctactgctccacatccaccagcagtgcgacctagagtgcgggctagaagaggacaggctacagatccgcatagtatagctgaaaggttgcgcagagagagaatagcagaaagaatcagggctttgcaagaactggtccctagtgtcaacaagacagatagagctgccatgctggacgaaattgtggattatgtcaagttcttgaggcttcaagtgaaggttttgagcatgagtagattgggtggagctggtgcagtggcaccactggtaactgatatcccattatcgtcagtcgaggaagaaggcggtgagggaagaaaccagccagcctgggagaagtggtcaaatgatggcacagaaagacaggtagccaagcttatggaagaaaatgtgggtgctgccatgcagtttcttcaatcaaaagcactctgcatcatgcccgtctcactagcttcagcaatataccagtcacaaccctcaggcacttctagtatagttaagcctgaaactaatcctccttcataatcatagtcagaactctggcacagatgcaccatccagtggtcccatcaagggctcacctaacactgctaggacccacgtgtatttaaat

SEQ ID NO: 63 - DNA, 779 bp, Glycine max
ttaattaatcagtagttagtgagtgatcgatatctggagatgggtcgaggcaagattgagataaagttgattgagaaccccaccaacaggcaagtcacttactccaagcgaaggaatggtatcttcaagaaagctcatgaactcagtgttctctgtgatgccaaggtttcacttatcatgttctctaaaaacaacaagatgcatgaatacattagccctggcctcacgacaaaaaggatcattgatcagtatcagaagactttgggggatattgatctgtggcgttctcactatgagaaaatgcttgaaaacttgaagaagctgatagatattaacaacaagctcagaagacagatcaggcataggataggtgagggtttggacatggacgacatgagcttccagcaactgcgcactcttgaagaggatttggtttcttccatagggaaaatacgagaacgaaagttccacgtgatcaaaacacggactgatacctgcaggaaaaaggttaaaagcctggagcagatgaatagagatctgctgtttgaacttgaaaagtgtgcgatccatccacaatttattttgcacgatgaaggagacgaggaatcagcagttgcactggccaacggcgcctccaccctgtatgcgttctgtcatcagcaccattctcatctgaaccttccctcccaccattctcacggagaagaaccctttaaaactgatgaccttcgccttgcttaattgagtgcaacaattaactagcaatgtaaaatttaaat

SEQ ID NO: 64 - DNA, 453 bp, Glycine max
ttaattaatttttgctttgctctttcctgagtttgaaaaccttagaaccatttcagtacacaacactttctgttccttaatggcatccagttcaatctcagcctctggctcatggagtgttaaggacaacaaggcctttgaaaaggctttagctgtttatgacaaggacactcctgaccgttggtacaatgttgctcatgctgttggtggcaaaactccagaggaagtgaaaaggcactacgaactccttgttcaggatgttaagcatattgagtctggacgtgtgccattcccaaattacaagaaaactacttcagggtcaactgatcaggaggaaaaaaggctgaggaatttgaatttgaacctccagtgacccccctcaagaacaacaaattgattttctaattttcatatcaaccaacatcattaatttccagcatccctgatttaaat

SEQ ID NO: 65 - DNA, 967 bp, Glycine max
ttaattaaatgatggggtacaggaacgacactttcgcggaggataatgcggttcgtgaagctgcgtcggggctagagagcgtcgagaaactcatcaagttgctgtcgcatactcaacaacaataccagacaacctcaaagtcttccatggaaaacatcgacaccgactacacagctgtcgctgacgtcgcggtttctaagttcaagaaggtcatttcgcttctgggccgcaccagaaccggtcacgcgcgttttagaagagcccctgtgcctgtgcctgtgcctgtggcttcacctccaccttcggaaccgagagtctaccgtgctacgccgctgcagcagatcccgccacccacccttcacactcactctgtcactgaccactctctgatccccaaaattgagagaaaggactcttccaagaccattaatttctcctattcaaattcgtttgtctcctccctcaccgctggcgataccgacactaaacaaccgtgctcgtcgtcgccgtcgccggccacggcttttcagatcacgaatctctctcaggtctcctccgccggaaagcctcctctttcgtcctcttcgttgaagaggaagtgtagctctgagaacttgggttctgctaagtgtggcagttcctctagccgatgccattgttcaaagaagagcagaaaaatgaggcagaagagggtggtgagggtaccggcaataagcttgaagatggctgatattccaccagacgattattcttggaggaaatacggacagaaacccattaaaggatccccccatccaagaggttattacaagtgcagcagtgttagagggtgtccagcgcgcaaacacgtagagagggctctggatgatccatctatgttggtagtcacctatgaaggagagcacaatcatacactctctgcagccgaagctactaatctcatcctagaatcctcttaaatttaaat

SEQ ID NO: 66 - DNA, 2523 bp, Arabidopsis thaliana
tttgacttttggattcttgtgactttgtttctctgatctgccaacaaatctttcacatttagttagggtttccataaatctcttatcaaatctggattggttttgtaggaagtaactgaaatggtgagaggaaagatcgaaatcaagaagattgagaacgtgacaagtagacaagtcacgttttcgaagcgaaggagtggtctctttaagaaggctcatgagctttctgttctatgtgatgctcaagtggcagctatgatcttctctcagaaaggaagattatatgaattcgctagctccgagtaagattcttaatttcagcttgattaattactccaatctttattatactatttcaatatttttttatgatgttgatatttgttgtcattatagtacttgtgtagtgtaatatctttcagaccaagtagtactagagatatctaggtaagatttcccaaaatttgcatctttcaattttatttttatattatgttctatagattttttttgttaacaattattttcctctttttacttccggttctttttacattttatagttccacttgttgttcatattatgaattaattagggttttcagaaatatagattattgaatattgagccttattctacgttggaactcaaagtgtcatgaaacggaaacccacaaaccatttgacatataatgtatatgttaatctattcaaatggattttcatagttaagaacataaatataaatcatgtagtatatatatgagaaatagattagtgtgaatatgattttttttggcactttctatatgatacttttttttttgataaactttatatatgatagttcaactgtgtgttcatgttctgagtcgaacttctatatttaatgcctcccatagtctaattcgacctttatggtcggacagctcatgtatgcatatggtcggggagaatgatttgcataataacatcatcacgataaatcaatcatggatactttgatgcatatctagctaggtttatatccgaaaaattcacacactcaaacacacatgcaaacatatccaataaatgtctagtttatcttaaccaatatataaactagtgatgacatgattaaccatgcaagagagtattcagatattattcaacctaatctcacaaactaatgaagcttttcttgagaattgtcttagtatcaggaacacgataaagcgatacgctgagtacaagagagagtattttgttgcagaaactcatcctatagagcaatacgtgcaggttcctttctatataacaattctcttcaattattactctagtttcataaatgacttacaaacctttttgcatgtatcatgtccaacttaagttgaaaataattttagtcacattttggctttacttttgtgacatttggtacaaacattttgtatatacaggggctaaagaaggaaatggtgacaatggtgaaaaagattgaagtgcttgaagtccataaccggtttgtatatatatcattgtcatatttcttttcaaatattttatgatagagttgattttcaagtagttactaaaggatgtgtgtcaattttgaaaatgtggctttgttaggaagatgatgggacaaagtttggattcttgttcggtaaaagaactttcagagatagccacacagatagagaaaagccttcatatggttagattaagaaaggtaacagaatacaaaattgatttaccattttacaatgtaatgagattttactttcaaaatcacggtgttattgcttagttttctttggattctatattggttgatattggtaggctaagttatatgaagatgagctacagaaactaaaagccaaggtaagaataattacaatttgattttgtttggatctcttgtccattgccatgtgttttaataacttgatctctcttctttaaaaattaggagagggaactcaaggacgagagagtcaggctttctctaaaggtatgtaccatatggtccagtttctatacccatatgtgtgttatatagtcataaatgcgtacaaatggaactaaacattgtaacttgaacccatttcattaaaaaaatagtttaacctatgtatggaggaacttggaatatggcggattatgcttcaaccaaaatgtcttgttttgtggttatatacttttttttttttttttgtggttatataattaagtggttatatacttaattatgattgttttatgtttccctaattatttatgcaaattaagaaaacaatttatactcacttatgccaggttggagaaagaccaatggggatgccgtcgggaagcaaagagaaagaggatgttgaaactgatctatttattggatttctgaagaaccgaccataaaatcgtccttggtcattaaacgtcatttctagctatctatctcaattaatgttatgtatatgagtaatagtgtttcaaaatttcaatcacttgtcttttcgtataaactcagaataatgt

SEQ ID NO: 67 - DNA, 1874 bp, Arabidopsis thaliana
ttaattaaatgtttgtttccgataacaacaatccttcacgggacataaacatgatgatcggcgatgttacatcaaacggagatctacagccacaccagatcatcctcggagaaagcagtggaggagaggatcatgagatcatcaaagcaccaaagaaacgagcagagacatgggcacaagacgagactcgaaccttaatctcattacggagagaaatggacaatcttttcaacacttccaaatctaacaaacatctctgggaacagatttctaagaaaatgagagagaaagggtttgatcgatcaccatctatgtgtacggacaagtggaggaacatattgaaagagtttaagaaagctaagcaacatgaagataaagcaacaagtggaggatcaacgaagatgtcttattacaatgagattgaagatattttcagagaaagaaagaagaaagtggcattctataagagtcctgctactactacaccatcttctgctaaagttgattcctttatgcaatttacagataaaggtacaatctttagcttggttttggggattctgattgatttgttgcaggtttggataaaatttcttaatgggttttggtttagatttggattgagaagataaagactgatcttttttggttttagttttgttcctcttttagtgctaaacctggttaaagaggcttttgaccattaatggctaattataaagttgtagatttggtttgttaaactagattgactttttatagtaaatttgggttttcttctaaaattgatctttatctttatcttcttgtaggttttgaagatactggtatttcatttacatctgttgaaggtattgatctcacatttattgaatctttgagtgtatatataaatggtggtgttgaaatcttttttagttggggaattactttgagagaaatggttgtatcagtcctaactttgggtaaacaattgtgcaacaacttatgattctcttataattcagtgaaataaaagtgaactcataccaaattgtagaatgttagtgataatgtgaagccgattttgtttggtttgtggaagtagtgttagtcactttagtcttgatatgagttgtatctgtatgcagctaatggcaggccaacgctaaatcttgaaacggagcttgatcatgatggtcttcctctccccattgctgctgatcccatcacagcaaatggagttcctccttggaattggagagacacccctggaaatggtaagtaaccagacaatctaacttagagagagcctctccttgtttattaagcttttgaacttttatggcaactactactaatcgttgtcatgtttgaagcaggcgttgatggtcagccatttgctgggaggatcataacggtgaaatttggagattacacaagacgagttgggattgatggtactgctgaagcaattaaggaagctatcagatccgcgtttagattgagaacaagacgagctttttggctagaagatgaagaacaggttattcgctctcttgaccgagacatgcctttagggaactatatactccgcattgatgaaggtaaatccactctttcttctatgctattcatcgaatactctctggttagaggtttctcaatatccatttgaattcagggatagccgttagagtgtgccactatgatgaatctgatccgttaccagtccatcaagaggagaagatattctacaccgaagaagattaccgagatttcttggctcgacgaggatggacatgtctgagagagtttgacgcgtttcaaaacatagacaatatggacgagcttcaatccggtcgcttatacagaggaatgagatgaggcgcgcc

SEQ ID NO: 68 - DNA, 1164 bp, Arabidopsis thaliana
ttaattaaatggatgcagcaattccgatttggaagagggacgatgataagcgttttgagttagctctggttcgattccctgctgagggttcgccggattttttagagaatatcgctcagtttctgcagaaaccgttaaaggaggtgtactcctactaccaagccttggtcgatgatgttacgctgatcgaatcgggtaagtatcctttgcccaagtacccggaagatgattacgtgtcactgccggaagcgactaagtctaaaacccagggcacggggaaaaagaagggaataccttggtcaccagaagaacacaggttagtcaaagaattatatgaataaaaggtttctttggattgtggaattaaagttcatatttaaatctttgaattagagtttctgttgactaggggaagtatatatcataacagtttaagtcttgctagggttgatgaattagggttttgttggttagggctaggaggaacctatattatatatacatgtctttgctaattatagatgatattgttgattaataataatgtgctcttaatggttatggacttttggttgattaataaatgataatattttgcagattgtttttggatggactaaacaagtatgggaaaggagattggaagagcatatcgagggaatgtgtgacgtcaaggagcccgatgcaagtggcaagccatgctcagaagtatttcttaaggcaaaaaaataagaaggggaaacgcttcagtatccatgatatgactctgggagatgccgaaaatgtaaccgtccctgtatccaacttgaattctatgggccagcagccacattttgatgaccaaagtcctccggatcattatcaagactacttctcccagagcaatgtaaccatccctggatgcaacatgcactttatgggccagcaaccacgttttggtgaccaaattcctccgggtgaatatcacccctactcccgggacaatgtaaccgtcactggatccaacttgaattctattggccagcagccacattttaatgaccaaatttctccggatcaatatggccgctacttgcaggaaaacttcgggtttttcgatgatgatggtgaagatgatgggagtttagcaagctttcaacaactatacaaggcttaaggcgcgcc

SEQ ID NO: 69 - DNA, 1312 bp, Arabidopsis thaliana
ttaattaaatggaatcgaatgtgatgttctctgggtttagtccaagaatgttgagcttagaaatgccgcaaaatccaccaaatccccaaaattcaattcagttccagcatcctcatccttacaccacctccggcgaccaacaaactcagccgccgataaaatccttatacccatacgcctcaaaacccaaacaaatgtcacccattagcggtggcggttgcgacgacgaggatcgcgggtcgggttccggatccggttgcaaccctgaagacagcgcgggaactgacgggaagaggaaattgtcacaatggcatagaatgaaatggacggatacaatggttaggcttttgatcatggcggttttctacatcggtgacgaagctggtttaaacgatccagtcgacgccaagaaaaagaccggcggtggcggtggcggcggaggaggaggagggatgttgcagaagaaagggaagtggaaatcagtgtcgagagctatggtggagaaaggtttctctgtgtcaccacaacaatgtgaagacaagttcaatgatttgaacaagaggtacaagagagttaacgatattcttggtaaaggaatcgcttgtcgtgtcgttgagaatcaaggattgttagagagtatggatcatttgactccgaagttgaaagatgaagtcaagaagttgcttaattctaagcatcttttctttagagagatgtgtgcttatcataatagttgtggtcatcttggtggtcatgaccaacaaccaccgcaacagaatcctatttcgattccgattccgagtcagcagcagaactgttttcacgcggcggaagcagggaaaatggcgagaattgcggagagggtggaggtggaggaggaagtagagtctgatatggcggaggattcggagtcagagatggaggaatcagaggaagaagagacgaggaagaagcggaggatatcgacggcggtgaagaggttgagggaagaagcggcaagtgtagtggaagatgttgggaagagtgtgtgggagaagaaagagtggataaggagaaagatgttggagattgaggagaagaagattgggtatgagtgggaaggagtggagatggagaagcagagagtgaagtggatgagatataggagcaagaaagagagagagatggagaaggctaagcttgacaatcagagacggaggcttgagacggagaggatgattctcatgttacggcggagtgaaattgagttgaatgagttacagtcttcgggtacacgggttgacccgagttccgctaaggggtgaggcgcgcc

SEQ ID NO: 70 - DNA, 886 bp, Arabidopsis thaliana
ttaattaaatgggaaatcagaagctcaaatggacggcggaggaagaggaggcgttactcgccggagttaggaagcatggccctggaaagtggaagaatattctccgcgatcctgaattagctgagcagctctctagtcgctctaacatcgacctcaaggataaatggcgtaatttaagtgttgctcctggtattcaaggctctaaggataagatacggacaccaaaaatcaaagctgctgcttttcatctggctgccgctgctgctgccgctattgtaactcctactcatagtggtcactcttctccagttgctactcttccccgaagtggatcttctgatttgagcattgatgatagttttaacattgtagttgatccaaagaatgctcccaggtatgatggaatgatatttgaagctctttcaaacttgacggatgctaatggatctgatgtcagcgcaattttcaacttcattgagcagcaacgacaagaagtgccaccaaatttcaggaggatgcttagttcaagattgaggaggcttgcagctcagggaaagcttgaaaaggttagccacttaaaatcaacacagaacttctataagatgaatgataatagcttggtacaaagaacaccacatgtagcgagaccaaaagagagcaacacgaaatcccggcagcagacaaacagtcagggaccctctatttcacagcagattgttgaagcttcaataacagcagcttataagctcgtagaagtagagaacaaattagatgtgtcgaaaggagctgcagaagagatagagagactgatgaaactggcagaagaggctgatgagatgctagtgatagcgagagagatgcacgaagaatgtaaataaggcgcgcc

SEQ ID NO: 71 - DNA, 1035 bp, Arabidopsis thaliana
ttaattaaatggcgaagacgaaatatggagagagacataggaaagggttatggtcacctgaagaagacgagaagctaaggagcttcatcctctcttatggccattcttgctggaccactgttcccatcaaagctggtctctctttcatcttcttctttattagtttttagtttctcaaactgagtcaactttgataattgttgttgggatttaatttgatagggttacaaaggaatgggaagagctgcagattaagatggattaattacctaagaccagggttaaagagggatatgattagtgcagaagaagaagagactatcttgacgtttcattcttccttgggtaacaagtaagtgtatctctaagacctaaccctattgttttagcagatgctagttatagagagactaatgatttaggtgtaattaggtggtcgcaaatagctaaattcttaccgggaagaacagacaatgagataaagaactattggcactctcatttgaaaaagaaatggctcaagtctcagagcttacaagatgcaaaatctatttcccctccttcgtcttcatcatcatcacttgttgcttgtggaaaaagaaatccggaaaccttgatctcgaatcacgtgttctccttccagagacttctagagaacaaatcttcatctccctcacaagaaagcaacggaaataacagccatcaatgttcttctgctcctgagattccaaggcttttcttctctgaatggctttcttcttcatatccccacaccgattattcctctgagtttaccgactctaagcacagtcaagctccaaatgtcgaagagactctctcagcttatgaagaaatgggtgatgttgatcagttccattacaacgaaatgatgatcaacaacagcaactggactcttaacgacattgtgtttggttccaaatgtaagaagcaggagcatcatatttatagagaggcttcagattgtaattcttctgctgaattcttttctccatcaacaacgacgtaaggcgcgcc

SEQ ID NO: 72 - DNA, 970 bp, Arabidopsis thaliana
gtttcttgtttgttgattaacccttaattaaatgtcatcaagtggaaccatttggagctatgaggaagaaaaagcatttgagaatgccatagctatgcattggattgaggaatcctcaaaagagcaatgggagaaaattgcttcagcagttcccagcaaaagcatggaagatgtgaagcaacattaccaggttctagtagaggatgtaagtgcaatagaggcaggtcacatatcattcccaaactatgctgcttctgaggaaatcacatcttcaaataaggactttcatggctcttccaaggccacaagctcagataaaagatcaaattgtaattatggacgtggtttttctgggttaggacatgactccaccactcatagtagtggtaaaggaggcttgtcaaggtcatcagaacaagaaagaagaaaaggaatcccatggactgaagaggaacacaggttatttttacttggtctagagaagtttggaaaaggagattggagaagcatttcaaggaactttgtgatatctaggactcccactcaagtggcaagccatgcacaaaagtacttcataaggttgaattcaatgaatagagacaggaggaggtctagtatccatgatatcactagtgtgaacaatggagatgtggctaataaccaagcacctattacagggcagcatagtagcacaattccttcaaacacaatgggtgtaggacaatcccttaagcatagagttcagggtcacataccacctggtttaggcatgtatggaacaccagttggacatcctgtggctgctcctccagggcacatggcatctgcagttggcactcctgtcatgcttcctcctggaccccacccccatgctcatcctcatccaccttatgttcttcctcttgcttacccaatggcacctccaacaatgcatcaataaatttaaatacccagcaaattggagctctgc

SEQ ID NO: 73 - DNA, 1139 bp, Arabidopsis thaliana
ttaattaagaggatatatatagagatgatgagttcttcttctccaacacaacttgcatctttaagagacatgggaatctatgagccatttcaacaaattgtcggttggggaaatgttttcaaatctgatatcaatgatcatagtcccaatactgctacttcctctattattcaggttgatcctagaattgatgatcacaacaacaacatcaagataaattatgattcttctcataaccagatcgaagcagaacaaccttctagtaatgataatcaagatgatgatggcaggattcatgataagatgaaacggcgtttagcgcagaaccgagaagcggctcgcaaaagtcgtttgagaaagaaggcttatgttcagcagttagaggaaagccggttaaagttatcgcagttagagcaagaactcgaaaaggttaagcagcagggccatttaggaccatctgggagtattaacacagggattgcatcatttgagatggaatattcacactggctacaagaacaaagcagaagagttagcgaactacgaacagcgcttcaatctcatataagcgacatagaactcaagatgctagtagagagttgcttgaaccattacgctaatcttttccaaatgaaatccgatgcagcaaaagccgatgttttctacttgatatcgggaatgtggcgaacttcaaccgaaagattcttccaatggattggagggtttcgtccatccgaacttttaaacgttgtgatgccttatcttcaaccattaacggatcaacaaatcttggaagtgagaaacctccaacaatcatcacaacaagcagaggatgctctgtctcaagggattgataaacttcaacagagtttagctgaaagcattgtgattgatgcggttatcgagtccacgcattatcccactcacatggctgcagctatagagaatcttcaagcattagaaggatttgtgaatcaagcagatcatctgaggcaacaaactttgcaacaaatggcgaagatcttaacgacaagacaatcggctcgaggtttactagctttaggagagtatcttcatagacttcgtgctcttagttctctttgggcagctcgtccacaagaaccaacttaaatttaaat

SEQ ID NO: 74 - DNA, 1020 bp, Arabidopsis thaliana
tcaaaaccgaaagaaattcaaaaagagtctttcgctgcttgttagtggggtgaggaacaaatgggaagaacaccttgttgtgacaagattggtttgaagaaaggtccttggacgcctgaagaagatgaggttcttgttgcgcatatcaagaaaaatggacatggaagctggagaacacttcctaaacttgctggtttacttcgctgtgggaagagttgcaggctgagatggacaaactatctgagaccagacataaagagaggtcctttcactgctgatgaagagaaacttgttatccagcttcatgccattctcggcaacaggtgggctgctattgcagcacagcttccaggaagaacagacaacgagatcaagaacttatggaacactcatttgaagaaacgtcttttatctatgggtcttgatcccagaactcatgagccattaccttcatatgggttagctaaacaagctccatcttcaccaacaactcgccacatggctcaatgggaaagtgctagggttgaagctgaggcaaggctttctagagaatcaatgctctttagcccttctttttactctggtgtagtaaaaactgaatgtgatcacttcttacgcatttggaattccgagattggtgaagctttcaggaatctcgctccattagatgaatcaactattactagtcaaagcccttgctcgagggcaacatcgacctcatctgcacttctgaagagctcaacaaattcttggggagggaaagaggttactgtggcgattcatggctcagattattctccatattcaaatgatcttgaagatgattcaacagactctgctcttcaacttctgcttgatttccctataagcgatgatgatatgagcttcttggaagagaacattgacagctactcacaggctcctcctattggtcttgtttccatggtttccaaattctagtcttatgagagcctaatatctaagaaaaagattcaaactttgcttccttttggtttttag

SEQ ID NO: 75 - DNA, 745 bp, Arabidopsis thaliana
ttaattaaagaagccagccaggccagagttgaagaagaatgggaagggggaagatcgaaatcaaaaggattgagaacacaacaaatcggcaagtgaccttctgcaagagaagaaatgggcttctgaagaaagcttatgagctgtcagtgctgtgtgatgcagaagttgccctcatcgtcttctccagccgtggccgtctctatgagtattccaacaacaacataagatcaacaatagagaggtacaaaaaggcatgttctgatcactcaagcgcgagcactaccacagaaatcaatgctcagtattatcaacaagaatctgcaaagctgcgacagcaaatacagatgctgcaaaattctaacaggcacctgatgggtgatgccttaagcacactgactgtgaaggaacttaagcagttggagaatagacttgaaagaggaatcactagaatcagatctaagaaacatgagatgctactggctgaaattgaatacttccagaaaagggagattgaactggaaaatgaaaatctttgcctccgaactaagataactgacgtggagaggattcagcaagtaaacatggtttctgggccagaactgaatgccattcaggcattagcttcccgtagcttcttcaatccaaatatgttggaaggtggaactgtttaccctcactcagataagaagattcttcatcttgggtgatcaataatatatgatcttggctagcctatgatttaaat

SEQ ID NO: 76 - DNA, 915 bp, Glycine max
actctttgtttcttgtttgttgattaacccttaattaagtgttgcataacaccaaagaactacaaatagttctcattgcatagccatagatggaatttcccaacgaagcaataccagaagggtgttcacagaagaaaacgggaagggggaaaataggaatcaagcggatcgagaacacaacgaataggcaagttaccttctgcaaacgccgtaacgggttgctcaagaaggcttatgaattgtctgttctgtgtgatgctgaggttgctcttgttgtcttctcaagccgtggacgcctctatgagtatgccaacaacagtgttagaggaacgatcgataggtacaagaaagcatgtgctgcctccacaaatccagaatctgtctctgaagctaatacacagttttatcagcaggaagcgtccaaattaaaacgacaaatcagagacattcagaatctaaacaggcacatccttggtgaagctcttagctctctgagtctgaaggaattaaagaacctggagagtagactggagaaaggtttaagcagagttagatccagaaagcatgaaactttgtttgccgatatcgagttcatgcaaaagcgggaaatagagctgcaaaaccataataattttctgagagctaagatagctgaacacgagaaagcacaacaacggcaacaggatatgataccgggaaatgtgtgcgagtcaaccatacctccacaatcatatgaccgcaatttcttccctgttaatctcatagattccaataatcaatattcaaatcaagaccagactgctcttcaacttgtctgataaacgatttgaaattatgccgcagcctttcaagtggtgtgggatcatttaaatacccagcaaattggagctctgcagagctttcgttgtatcatcg

SEQ ID NO: 77 - DNA, 948 bp, Glycine max
gtttcttgtttgttgattaacccttaattaagaaatcttaaagcagtaagtcatcatggataaatcagagcagactcagcagcaacatcagcatgggatgggcgttgccacaggtgctagccaaatggcctattcttctcactacccgactgctcccatggtggcttctggcacgcctgctgtagctgttccttccccaactcaggctccagctgccttctctagttctgctcaccagcttgcataccagcaagcacagcatttccaccaccaacagcagcaacaccaacaacagcagcttcaaatgttctggtcaaaccaaatgcaagaaattgagcaaacaattgactttaaaaaccacagtcttcctcttgctcggataaaaaagataatgaaagctgatgaagatgtccggatgatttctgcagaagctccagtcatatttgcaaaagcatgtgaaatgttcatattagagttgacgttgagatcttggatccacacagaagagaacaagaggagaactctacaaaagaatgatatagcagctgctatttcgagaaacgatgtttttgatttcttggttgatattatcccaagagatgagttgaaagaggaaggacttggaataaccaaggctactattccattggtgaattctccagctgatatgccatattactatgtccctccacagcatcctgttgtaggacctcctgggatgatcatgggcaagcccgttggtgctgagcaagcaacgctgtattctacacagcagcctcgacctcccatggcgttcatgccatggccccatacacaaccccagcaacagcagccaccccaacatcaacaaacagactcatgatgaccatgcaattcaattaggtcggaaagtagcatgatttaaatacccagcaaattggagctctgcagagctttcgttcgtatcat

SEQ ID NO: 78 - DNA, 751 bp, Glycine max
ctttcaaactctttgtttcttgtttgttgattaacccttaattaaggtttggcaattggcttagatttcttgtacttggaacaagatggaaagcactgtcacatttgagactgatctcaacctcaaggcaaccgagcttagattggggcttccaggaacagaagaaattgttgaaaaaccacttcctgcaagtgctagaattaccaacaaaaggcctttgtctgaaacctctgaggagtgtgcttcaaagggttctagtgctccacatgtggaaactgaagcagcccctcctgccaaggctaagatagtggggtggccaccaatcagatcctacagaaagaacagcctccaggagaatgatggtgctgggatttatgtgaaagtgagcatggatggagctccttacctcagaaagatagacttgaaggtctatggaggctacacacaactcctcaaagctctagaaaacatgttcaagttgaccataggtgagtattctgaaaaagaaggttataagggatctgactatgcacctacatatgaagacaaagatggtgactggatgttagttggagatgttccatgggacatgtttgtgacttcttgcaaaaggctaagaatcatgaaaggatcagaggcaaggggtttgggttgtgctgtatgagaaaaccaaaccactaaaaattactatgagcagagaatttaaatacccagcaaattggagctctgcagagctttcgttcgtatcatc

SEQ ID NO: 79 - DNA, 870 bp, Glycine max
aactctttgtttcttgtttgttgattaacccttaattaagccacctcgtttcattgttttgaattcaactgagaaaaacgacaacgaggatgtttcaggagagcagcgtgacgcggtggccgactcagtggactcgctaccacgacaagctattcgagcgggcccttctggtcgtgccggaggatctgccggaccggtgggagaagatcgccgaccaggttcccggcaagtcggcggtggaggtaagggaacactacgaggccctcgtccacgacgtcttcgagatcgactccggccgagtcgaggtcccgagttacgtcgatgactcggtggcgatgccgcccagtggcggtgctggaatttctacgtgggacaacgctaatcagatctcattcggttccaagcttaaacaacaaggcgagaacgaaaggaagaagggcacgccttggactgaagaggaacacaggctgtttctcattgggcttagtaagtttgggaagggagattggagaagcatttcaagaaatgttgttgtgacaagaacaccaactcaagtagctagccatgcccagaaatactttcttcgccagaattcggtgaagaaagagaggaagagatcaagcattcatgacataacgactgtggacagtaactcagcgcctatgcccattgatcagacttgggttcctcctccgggtggttcactgcagcagtcacagcaatacccatcaagcaacatgcatgatcaaatgggtacgtttgggtattcaaactatggctttgacatgtaaagaatgctagaagcagtgtgttctgtatatagtgctgatttaaatacccagcaaattggagctctgcagagctttcgtt

SEQ ID NO: 80 - DNA, 711 bp, Glycine max
tgtttcttgtttgttgattaacccttaattaagttctctcttgctctttcttgtcagggtttggtcatataagaagccatggccagttttggaggaaccacacaaaagtgcatggcttgtgccaaaactgtgtatcttgttgataagttaactgcagatagccgtgtctatcataaggcttgcttccgatgccaccattgccgtaatacccttaagcttagcaactactgttcttttgagggggtgctctactgcagacctcactatgatcaactctacaagcgaactggtagcctggacaaaagttttgaaggaatacccaaaattcagaaaccagagaaaccggtcactggtaatgagaatactaaggtcctcgcaaacgtgttcttgggcaccagagacaaatgtgtgtgttgcaacaagacagtgtatcccactgagagggttacggttaatgggacaccctaccacaagggctgcttcaagtgtacctatggaggttgtactgtaagctcatcaaactttatcacacacgagggaaagccctactgcaaacaccatcacattcaacttttcaaagagaaagggaattacagtcagctcgagaatgaatgctagctagcaatgtcgtatactactaccatggatattgaaccattatttaaataacgaaaattggagctctgcagagctttcgttcgtatcatcggt

SEQ ID NO: 81 - DNA, 2231 bp, Arabidopsis thaliana
ttaattaaatgagttcttcagatcgtgacatcatcgatatcgaatcaggagaagaagatttgtatagcgatggtggtaacgacatcatcgatatcgaatcaggagaggaggatttgtacagcgatggtggtaacgtatccgatgactacaaccctgtggacgacacaattagtcgatctgagaaaagttacgttgttgttaaggaagaagacattcttaagcttcaaagagacgatatcgaacaagtttcgacggttctctctgtaagccaagtggaatcgattgttctgcttcttcactatcattggtgtgttagtaaactcgaagatgaatggtttacggacgaagagagaatccgtaaaaccgttggtatattaaaggagcctgtcgttgatgttaatggtacagaagtggatattcaatgtggaatttgctttgaatcatacactcgaaaggaaattgctagggtttcttgtggtcatccttattgcaagacctgctggactggttacatcactacgaaaatcgaagacggtccgggatgtttaagggttaaatgtcccgaaccttcttgttacgctgttgttggtcaagacatgatcgatgaggttactgagaagaaagataaggacaagtattatagatattttcttaggtcttatgtcgaagacgggaagaagatgaaatggtgtccatcaccgggatgcgaatacgcggttgaatttggtgtaaatggaagtagtagttacgatgtttcttgtttgtgttcgtataagttttgctggaattgctgtgaagacgctcactctcctgtggattgtgaaacagtgtcaaagtggttactaaagaacaaggatgagtcggagaacatgaattggatacttgctaagacaaagccttgtcctaaatgcaagcgtcctattgagaagaacactggatgtaaccatatgtcatgctcagctccatgtagacattatttttgttgggcatgccttcaaccattgagcgatcacaaggcttgcaacgcgtttaaagcagacaatgaggatgaaactaagagaaaaagggctaaagatgcgatcgatagatacacgcatttttatgaaagatgggcattcaatcaatcctcgaggcttaaagctatgagtgatttggagaaatggcaatcggtggagcttaagcagcttagtgacattcagagcacaccagaaactcagctcagtttcaccgtagatgcatggcttcaggttagtaaaagtaacatttacaagaccattgaaaatgtttgtggaaacgacggaacataatggaattactaccatagtagatatataataaacgacaagctttcttgaagacgattttatgagtaacttatcattgatctgaactgatgaatagatagattacaaaaaaagtgtgtataattttcaaactggcaaaaatcatcccaccattatgctagccaccaatgagattctaagttagattttgttacttacattgtaacagcggaacataatctgtagtagaaaaaactagaaaagctttattaaattgaaaaatcatcttaatgacggttaactttccgaaatggtgaaaccattccaccattatgcatgagaactaccaattagactctaagttagttacggcattaattatattctcattccaccattatgcatgagaactaccaattagactctaagttagttacgacattatattaattcttgttgacatgtacttgattttactgttacagatcatcgagtgtaggagggtcttgaaatggacctatgcatatggatactacatacttagtcaagagcgcaacaagcgagtatttgcaaggtcagtttttggtacggaaacacttaatttgtgtgtaatcttaatttttccattaattgtagcagaactttttcgttgtcttgttgttcagctgaggcagaaaatggtttggagagacttcatcattgtgcagaggaggagttgaaacagtttatcgggaaaattgaagacccatcaaaaaatttcggtgagctccgagcgaaattaattgatttgactaaagcaactaaaacctacttcgaaaatctggtgaaagctttggagaacggtcttgttgacgtggcatataatgagagccagtcaatagaagaacctgaatcttttaccaaaaggtccaagacaaggaaaataaaaactttaatttagggcgcgcc

SEQ ID NO: 82 - DNA, 2803 bp, Arabidopsis thaliana
ttaattaaggtttcggttccgatctggtttcttgacaatggcgtcagaagcttcgccttcttcttcggccaccagatcggagccacccaaagactctccggcggaggagagaggtccagcttctaaggaagtatcagaagtaatagaatcgctaaagaagaagcttgcagctgataggtgtatatcaataaagaaaaggattgatgaaaacaagaagaatttgtttgctattactcaaagttttatgaggtcttctatggaacgaggaggtagctgtaaagatggcagtgatcttttagttaagaggcaaagagattcgccaggtatgaaaagcggaatcgatgaaagtaataacaacagatatgtagaagatggacctgccagttcaggaatggttcaaggatctagtgtccctgtcaaaatttccttacgtcctatcaaaatgcctgatatcaaacgtttgtcaccttataccacatgggtttttctggacagaaatcaaagaatgactgaagaccagtctgtagtgggtcgaaggagaatttattatgatcaaactggcggggaagcgcttatctgcagtgatagtgaagaggaggccattgacgacgaagaagaaaaaagagattttttggagcctgaagattatattattcgcatgacccttgagcaactaggtctttcagactcagtcctggcggaactagcaagtttcttgtctagaagtactagtgaaatcaaggcaagacatggagtgcttatgaaggaaaaagaagtatccgagagtggcgataatcaagcagagagctcccttctcaacaaagatatggaaggagcattagattctttcgataacctgttctgccgtagatgccttgtatttgattgccggcttcatgggtgttcacaggatctcatttttccggctgagaaaccagctccatggtgtcctcctgtagatgaaaatttaacctgtggtgcaaactgctataaaacgcttctcaagtctggaagatttccgggatatggcaccattgaaggtaaaactggcacttcatcagatggtgcaggtactaaaaccacacccacgaagttctccagcaaacttaatgggagaaaaccaaagaccttcccaagtgaaagtgcatcgtctaatgaaaagtgcgcactagaaacaagtgactcagagaatggactacagcaggataccaattccgataaagtttcatcatcgccaaaggtgaaaggtagtgggagacgagtaggtcgtaagaggaacaaaaaccgagttgctgagcgagttcctcgtaagactcagaagaggcagaagaagacagaagcctcggatagtgattccatcgccagtggaagttgttcacccagcgatgcaaaacataaagataatgaagatgctacttcctcttctcagaagcatgtaaaatctgggaactccgggaagtcaaggaagaatggcactcctgccgaagtctccaataattctgtgaaggatgacgttcctgtttgccagtcaaatgaggttgcgtcagagcttgatgcgccgggtagtgatgaaagtctaaggaaagaagagtttatgggtgaaactgtatctcgaggaagattggctacaaataagttgtggagaccacttgagaaaagcctttttgataaaggtgttgagatttttggaatgaatagctgcttgattgctagaaatcttttgagtggtttcaaatcatgttgggaggtcttccaatacatgacgtgctcggaaaataaagcttccttctttggaggtgatggattgaatcctgatggctcttccaagttcgatatcaatggaaatatggttaataaccaagtgaggagaaggtcaagatttctacgtaggagaggcaaagtgcggcgcttgaagtatacctggaagtctgctgcatatcattcaattaggaaaagaattactgagaagaaagaccagccctgccgtcagtttaatccatgtaactgcaaaattgcttgtgggaaggaatgtccttgtttgctaaacgggacttgctgcgagaagtactgcggttgcccaaagagctgcaagaataggtttagaggttgtcattgtgccaaaagtcagtgtcgaagccgccagtgtccatgctttgctgcagatcgggaatgtgacccagatgtttgtagaaactgctgggtcattggtggggatggttcgcttggggtcccaagccaaagaggcgataattatgagtgcaggaatatgaaattgctcctgaaacaacaacaaagggttttacttggaatatctgatgtttctggttggggagctttcttaaagaacagtgtaagtaagcatgaataccttggggaatacacaggagagctgatctcacataaagaggcagataaacgcgggaagatatacgatcgcgagaactgctcttttctcttcaatctaaacgatcagtttgtgctagatgcttacaggaaaggagataaactgaaattcgccaaccattctcctgaacctaactgttacgcaaaggtcatcatggttgctggagatcacagggtggggatcttcgcaaaagagaggatactggctggagaagaactattttacgattaccggtatgagccagatcgagctccagcttgggccaaaaaacctgaagctcctggttctaagaaagacgaaaatgttacaccttctgttggtagacccaagaagcttgcttagcaacaaaagaaacaaccatttttttgtcaattctttggttacaggtggaatttaaat

SEQ ID NO: 83 - DNA, 1108 bp, Glycine max
ttcatttatttgtcagctttcaaactctttgtttcttgtttgttgattaacccttaattaagatgaaccagaagttcatcggaaagccgccggcgacggtggacctggatcggatgccggagcgtgggtcccaccaccggcgttcccactccgacacctccttccgcttcgccgcgaacttcgacgaccttctcctcttcgacccctccgacttcgacatctccggcctcccgtcgccgctccctctgccatctccggtctccgccggcttggttccgatgtccgtcgactccgacgagtccggcaaacagccgaggccggccggggcgtccgccggcgggcacctgcggagtctgtcggtggattctgacttcttcgacgggctcgggttcggcggcgacgagagaggcgccgggaaaggaggcggcggcgagcggagggtggggcaccaccggcacagcaactcgatggacgggtcgtcgacgacgtcgtttgaggcggactcggcgatgataatggacggtgtgaagaaagctatggctcctgataaacttgctgaacttgctcttatggatcccaagagagctaagaggattcttgctaacaggcaatctgctgcaagatccaaggagaggaagattcgttacacaagtgagttggagaggaaggtgcagactcttcagactgaagcaactaacctttctgcacagcttaccatgcttcagagagacactacagatttgactacagagaataaggagctcaaactgcgtttagaggctttggagcaggaagcacagcttagagaagatctcaatgaggcattgaaggaagaactgcagcgccttagggcacaaagtactcgtttgggtgctattggtggtaacccttcttttggtgggatattcaaccagttggcttcccaattagccatgcaacagttgtctaattctgcaccccatcagcagacacaacaccagccacaggttggcatgcctcctcctccctctggacagaaccaccctaacttcatggacttcaatcagcagaagtaaatttaaatacccagcaaatacccagcaaattggagctctgcagagctttcgtt

SEQ ID NO: 84 - DNA, 1077 bp, Arabidopsis thaliana
atggagggttcgtcgtcgacgatagcaaggaagacatgggaactagagaacagcattctaacagtagactcacctgattcaacctccgacaacatcttctactacgacgatacttcacagactaggttccagcaagagaaaccgtgggagaatgatcctcactactttaaacgagtcaagatctcagcgctcgctcttcttaagatggtggttcacgctcgctctggtggtacaattgaaataatgggtcttatgcaaggtaagaccgatggtgatactatcattgttatggatgcttttgctttaccagtggaaggtactgagacaagggttaatgctcaggatgatgcttatgagtacatggttgagtattcacagaccaacaagctcgcggggcggctggagaatgttgttggatggtatcactctcaccctggatatggatgctggctctccggtattgatgtttctacgcagaggcttaaccaacagcatcaggagccatttttagctgttgttattgatcccacaaggactgtttcagctggtaaggttgagattggtgctttcagaacatactctaaaggatataagcctccagatgaacctgtttctgagtatcaaactattcctttaaataagattgaggactttggtgttcattgcaaacagtactattcattagatgtcacttatttcaagtcatctcttgattctcaccttctggatctactatggaacaagtactgggtgaacactctttcttcttctccactgctgggtaatggagactatgttgctggacaaatatcagacttagctgagaagcttgagcaagccgagagtcatctggttcagtctcgctttggaggagttgtgccatcatcccttcataagaaaaaagaggatgagtctcaactaactaagataactcgggatagcgcaaagataactgtggaacaggtccatggactaatgtcgcaggtcataaaagatgaattattcaactcaatgcgtcagtccaacaacaaatctcccactgactcgtcggatccagaccctatgattacatattga

SEQ ID NO: 85 - DNA, 1479 bp, Saccharomyces cerevisiae
gctttcaaactctttgtttcttgtttgttgattaacccttaattaatccgggcgcgcctgatttatcacaagtttgtacaaaaaagcaggctcctgcaggaccatgtcaaacaagtttcactgtgacgtttgttcagctgattgcacgaacagagtgagggtttcatgtgctatttgtcccgaatacgacttatgcgtgccctgcttttcacaaggctcgtatacaggaaagcatcgcccttaccatgattataggataatagagaccaattcataccccattctctgtcctgattggggtgccgatgaagaattgcagttgattaaaggcgcacagactttagggctcggtaattggcaggatattgctgaccatataggcagcagaggcaaagaagaagttaaggaacattacctaaaatattatctggaaagcaaatactatccaatacctgatattacccaaaatatacatgtcccacaagatgaatttttggaacagcgaaggcatagaatcgagtccttccgggagaggccgctagagcctccaagaaagcccatggcatcggttcctagctgccatgaagtacaggggtttatgccgggcagattagaatttgaaacagaattcgaaaatgaagctgaaggtcccgtaaaggatatggtttttgaacctgatgaccagcccttagacattgaattgaagtttgccatcttggacatttacaattctagattgacaaccagagcagaaaagaaaaggctattatttgaaaaccatttaatggattacagaaagttgcaagctattgacaaaaagaggagcaaagaagccaaagaattgtataaccgcataaaaccttttgctcgtgttatgactgcacaggattttgaggaatttagcaaggatatattagaagaattgcattgcagggcaagaatacagcaattacaagaatggagaagcaatgggttaaccacgttagaagcaggtcttaagtatgaacgagataagcaagctagaattagcagtttcgagaaatttggcgcttctacggcggcgtcactcagtgagggcaatagccgttataggtcgaattctgcacataggtcgaacgcagaatacagccaaaactacagcgaaaatggcggtagaaagaaaaatatgaccattagcgatatacagcatgcacctgactatgcactgttgtccaacgacgagcagcaactttgtattcaactgaaaattttacctaaaccgtatctcgttctaaaagaggtaatgttcagagaactgttgaagactgggggtaatctaagcaaaagcgcatgtagggaactacttaatatagaccccataaaagcgaatagaatatacgattttttccagagccagaattggatgtagctcgagacccagctttcttgtacaaagtggtgataaattggagctctgcagagctttcgttcgtatcatcg

SEQ ID NO: 86 - DNA, 909 bp, Arabidopsis thaliana
ttaaacttttgttcccttattcacaatctcctgccacctctcatttctctagctacatatatgggttctattagaggaaacattgaagagcctatatctcagtcattaacgaggcagaactctctctatagcttaaagctccatgaggttcaaacccacttaggaagttctggaaaaccactaggaagcatgaaccttgatgagcttctcaagactgtcttgccaccagctgaggaagggcttgttcgtcagggaagcttgacgttacctcgagatctcagtaaaaagacagttgatgaggtctggagagatatccaacaggacaagaatggaaacggtactagtactactactactcataagcagcctacactcggtgaaataacacttgaggatttgttgttgagagctggtgtagtgactgagacagtagtccctcaagaaaatgttgttaacatagcttcaaatgggcaatgggttgagtatcatcatcagcctcaacaacaacaagggtttatgacatatccggtttgcgagatgcaagatatggtgatgatgggtggattatcggatacaccacaagcgcctgggaggaaaagagtagctggagagattgtggagaagactgttgagaggagacagaagaggatgatcaagaacagagaatctgcagcacgttcacgagctaggaaacaggcttatacacatgaattagagatcaaggtttcaaggttagaagaagaaaacgaaaaacttcggaggctaaaggaggtggagaagatcctaccaagtgaaccaccaccagatcctaagtggaagctccggcgaacaaactctgcttctctctgatcctaaagactcttctttctttcttcttctttgtgttggtttatatcagaccgctttgtt

SEQ ID NO: 87 - DNA, 1244 bp, Glycine max
ttcttgtttgttgattaacccttaattaatccgggcgcgcctgatttatcacaagtttgtacaaaaaagcaggctcctgcaggaccatgacttctttgtctacccatcacacctatagccgaaagcaaaaatctctcggcctcctctgcaccaattttctgagtttgtacaacaaagaaggtgtgcgcctggtcggtctcgatgacgcagcttcgcggttaggtgtagaaagacgtcggatctacgacatcgttaatgttttagagagtgtcggtgtgctaaccagaaaagctaagaatcagtatacttggaaaggattttgtgcaattcctgctgccttacaagaacttaaggatgaaggtttgaaggagaatcctggatcatttgatgactccaatgacaatgcaaaagtgtctgatgatgaggaggaggaagaagaaacatttcctaatattaacattgggagtcagagtgagaaggaaaatcctgattacactgctactgtcaaatcctccaagaatgaaaacagaagggaaaaatctctggcattgcttactcagaattttgtcaagctttttgtctgctctaattttgaaatgatctcccttgacgaagctgcaaagttgttgcttggaaatgccaacaatagaacaaaagtcagacgtctatatgatattgcgaatgtgttatcctccatgaacctaatcgagaagacccatacaacaaacacaagaaaaccagcattcaggtggttgggtgtgaggggaaaaacatggggtggatcagttgacttggctcaaaattcaaatgtcaaagagtcacggaaaaggatgtttggaactgacattggaaacataagttttaaaaggaacaaagttgatttgtccatggatggccagaattctaaaatgcaaaatcaacacgaaaatattagtccacgagctcagttagagaaaatcatcataaaaaaagatgctaagcagacttcagagagctatcagtttggcccttttgctccagcttatgtgcccaaagttggaacctctgaaaataatagtgtgaaaaaggtgcatgactgggacagcctcgcacaggagcatcgtcctcaatatcaaaaccaaggttagagctttaaaagatctattttcccactacatggaagcatggaaatcttgctcgagacccagctttcttgtacaaagtggtgataaattggagctctgcagagctttcgttcgtatcat

SEQ ID NO: 88 - DNA, 971 bp, Glycine max
ttcttgtttgttgattaacccttaattaatccgggcgcgcctgatttatcacaagtttgtacaaaaaagcaggctcctgcaggaccatgggtgctccgaagcagaaatggactgcagaagaggaacaagcacttaaagccggagttgtcaagcatggtgttggtaaatggcgcaccatactgaaggatccagagtttagtagtgtcttgtacctgcggtcaaatgtggatctcaaggataaatggagaaatctgagtgtgatggcaaatggatggagctctagggaaaaatctaggttatcagtcagaagggtgcatcaggtcccgagacaggatgagaactctatggctatcactgctgttgctccaagtgatgaagaaattgttgatgttaagcctcttcaagtttctagagatatggtgcatattcctggtccaaagaggtctaatttaagtttggataaacttataatggaagcgatcacttgcttgaaggagaatggtggttctaataagacagctattgcagctttcatagaggtaaatcgcaagtatagaattgcacctatagcagcatattctgacagaagaagaaactcatccgtgttatatttggaagggaggcagaaagcctctatgaaaattgacagggatgagaccaacatccttactagatctcagatagatttagagttagaaaagataaggtctatgactccacaagaggcagctgcatttgctgctcgagcagttgctgaagcagaagccgccattgcagaagcagaggaggcagcaaaggaagcagaggcagcagaagctgatgcggaggctgcacaagcttttgcagatgctacaacaaaatcagcgaaagggagaaaatccccaaagaggatccatgcttgactcgagacccagctttcttgtacaaagtggtgataaattggagctctgcagagctttcgttcgtatcat

SEQ ID NO: 89 - DNA, 608 bp, Zea mays
ttcttgtttgttgattaacccttaattaatccgggcgcgcctgatttatcacaagtttgtacaaaaaagcaggctcctgcaggaccatggcgacccctgcacggatcgagctggacaagctgagcgtggagcagctcaaggggctcaaggagcagacggatctggaggtcaacctcctccaggacagcctcaccaagatccgcaccgccgccacccgactcgagaacgcctccgccgcgctccaggacctatccctccgcccccaagggaagaagatgctcgtgccgctcactgcgtccctctacgttcccggttcactggacgacgcggagaaggtcctcgtcgatgtcggcaccggttacttcatcgagaaaaccatggctcaggggaaagaatactgtgaaaggaaaattaatttattgaagtcaaattttgatgaattggttgaggtggctacgaaaaagaaagccatagcagacgatatgggtttgctactacaagccaagctgaggcaagcgtcaccgggcccaagttcatgactcgagacccagctttcttgtacaaagtggtgataaattggagctctgcagagctttcgttcgtatcat

SEQ ID NO: 90 - DNA, 1085 bp, Glycine max
aactctttgtttcttgtttgttgattaacccttaattaatccgggcgcgcctgatttatcacaagtttgtacaaaaaagcaggctcctgcaggaccatgaatgttaaggtgcatagctctgatgataccaagaaggatgaagaggttgtgcttcctggctttagattccaccccacggatgaagagcttgttgggttttatctgcagagaaaggtggacaaaaagcctctaaaaattgaactcatcaaacaggttgatatctacaaatatgatccatgggatcttccaaaggtgaattcttttggggacaaagagtggtattttttctgcataagagggaggaagtacagaaacagcgtgaggccaaacagggtaactaggtcagggttctggaaggccacagggattgacaagtccatatattgcgtgaaagaaccccatgaatgcattggcctgaagaagtcattggtctattaccgtggaagtgctggcaaaggcaccaaaactgattggatgatgcatgagtttcgccttccacccaatgcaaaatccagccccaatgatgttcaagaagcagaggtgtggacactctgcaggatattcaaacgcatcccatctttcaagaagtacgctccaaacttgaaagactcaacaccagccaccaaaccaaaccctgtgaattccaacgcatccaccttagattctgacaattgctgcaagccatatttgatttgcagagaccctatgatgatgcaacaaatagaaagaaaaccagttattggacaagttgatgaaaagaaacacttgtttttgggccaatttggcccactatcccatcttcaggccccatcaaccaccccttacccaaatttttggaaccagaataatgttgaggaccacgcatttgccaatgagaattgggatgacctaagatctgtggttcagtttgcaatcgatccatccacggtgtttgattgtaccgaaacatatattccaccctacttttcttagctcgagacccagctttcttgtacaaagtggtgataaattggagctctgcagagctttcgttcgtatcatcggtt

SEQ ID NO: 91 - DNA, 989 bp, Gossypium hirsutum
aaaaaagcaggctcctgcaggaccatggtgggaaaagaagatctgggtttgagtctcagtttgggttttcctcagaatcgccactccttgcagctgaatctaaggccttctttgattccttcctccgttgattcttgctcttcggtcccttctgggtttacagccattcacaaatcattatggaacgatgtttctgctccttcagatcctaacgcagaatctttccgaggcgagactagatcatttcttagaggaatcgacgtgaacagattgccatctacggtcgattgcgaagaagcagctggagtttcatctccgaacagcacgatatcgagtgtgagtgggaaaaggagcgaaagggaaggcactaatggagatgagcttgatattgaaagagcttgttctcgtggcatcagtgatgaggaagatggtgacgcttcgagaaaaaaacttaggctttcgaaggatcagtctgctattcttgaagaaagctttaaagaaaacaacactctgaacccaaaacaaaagatggctttggctaagcagctgggattgcgacccagacaagttgaagtttggttccaaaacagaagggcgaggaccaagctgaagcaaactgaggttgactgtgagttcctaaagagatgctgtgagaatctgacggaggaaaacaggcggttgcagaaggaagttcaggagctgagagcactgaaactttctcctcagttctacatgcaaatgaccccacctacgaccctcaccatgtgcccatcgtgtgagagagtaggtgcatcatccaccgttgatccaagatcccatcatcagctaccccagaaccaccacagggccatccccatcaacccttgggctccggctgctgccccaatccctcatggaccgttggatgctcttcggcttcgatcgtaatttttcaaccaatgctcaagggcgtttttgtcaaatctcgagacccagctttcttgtacaaa

SEQ ID NO: 92 - DNA, 425 bp, Zea mays
aaaaaagcaggctcctgcaggaccatgggaggcaagtgcccgcaccgcaaggtgaagaagcgccgcctctcgcacaagacggcgcgccgcggtaagttcctcctcaaggccgacgatgccgtctacgacgagctcgtcaagctggccgaccagggcaaggacgctgaaggcaaggagctccccgtcgacgaggacctcccaggcatgggacagttctactgcctccattgcgatcgctactttgctagtgaaagtgtgaaggatgaccactaccgctcaaagcgccacaagaaaagggtcaaggtaatgtctgggccagccccacacacgcaacttgatgctgaacttgctgctggaatgggaaagcctgacaatggcctgaagcttatgtccatgtgactcgagacccagctttcttgtacaaa

SEQ ID NO: 93 - DNA, 1121 bp, Glycine max
ttcttgtttgttgattaacccttaattaatccgggcgcgcctgatttatcacaagtttgtacaaaaaagcaggctcctgcaggaccatgaagtgggaaagtataaccctttcttctcctacttcttgtactccaaactccaacaccaattggttggtggaaaataatagcaggagcacaaaatggacccctgaagagaacaagctctttgaaaatgctcttgcagtgcatgataaggacaccccagatcggtggcacaaagtggctgagatgattcctggaaagacagtggttgatgtgataaggcagtacaaggagttggaagtggatgttagcaatatagaagctggtttgattccagttcctggctatagtagcactgctatctcacccttcaccttagattgggtgaacactcctggctatgatgggtttaaaggatgtggaaagagaccttcctcagtgagacccattgagcatgaaaggaagaaaggagtgccttggactgaagaggaacataaattgtttctattgggtctgaagaagtatgggaaaggcgattggagaaatatttctcgcaatttcgtgattactagaactccaacacaggttgctagccatgctcagaagtacttcataaggcaactttcaggaggcaaagacaagaggagggccagcatacatgacataacaacagtgaatctcacagaaaccatcacaacttcttgttcagaagacaccaatagatccacttcaccacatgttctctcacagccgcagcagcaaaattctactcctactacccccagaactcattttcagtggactaatcagtctaacacaggagtagctatgactctcaaccctgctcatgaaagagtcttcatgtctccttatggtgctaactcctttggggttaaaattgagggacagaatcttcatgagtcttcttacttgggacctcagacacagaacatggttttccaaatgcaacagtcctcacaacactagttccatgcattagaacttgttgtagtgaattattaatgggtctcgagacccagctttcttgtacaaagtggtgataaattggagctctgcagagctttcgttcgtatcatc

SEQ ID NO: 94 - DNA, 774 bp, Glycine max
ttcttgtttgttgattaacccttaattaatccgggcgcgcctgatttatcacaagtttgtacaaaaaagcaggctcctgcaggaccatggcgaaggagaagaaaaacttgtccaacaagaacaagaagccaagcaatgcagacgaggttcacttccgcggagtccggaagcgcccctggggccgctatgccgccgagatccgcgaccctggaaagaagacccgcgtctggctcggcaccttcgacaccgccgaggatgccgcccgcgcctacgacgtcgccgcccgaaacttccgtggccccaaagccaaaaccaacttccccttcctccccgacaacaacaccaacgttaacctcaacaagaagaacaacaacgttaacgttaaatctgacagtcccagccagagcagcaccgtggagtcctccaccccggagcgtgaattcacgcgccgcgccgcccccgccgcaatggatcgctttccgttcctacccatccagcagcaaatcctcgtgacccaccccgtcgcacccatgcgcccggtttactttctcgaccgggcccacttcatgacccagcccttcccactccgattcgaaccgggtccggtccagagcgactccgactcgtcctccgtcgtcgtcgattgccagcccaaaagagagctcaatctcgatcttaacttggctccacctaatgaatattagctcgagacccagctttcttgtacaaagtggtgataaattggagctctgcagagctttcgttcgtatcatc

SEQ ID NO: 95 - DNA, 1008 bp, Glycine max
ttcttgtttgttgattaacccttaattaatccgggcgcgcctgatttatcacaagtttgtacaaaaaagcaggctcctgcaggaccatggacatggagcttttggatttgccccttgactttgaggatgtggaaactgatgctgtggaagaacaagattgggatgctcagctcaaactccttgaagacccaccaccaccacttggagttttcccactacaacaatcctctgcattctgtggacaaactcggaatgagaatgcgaaactcggcagcaagagtttctctgcttctctagcgaagactgtcagacctgcatatggcaaaactattcctgtccagaaagtctctttaaaaggaaaagatttgctccaattccaaaccaacagcccagtttctgtttttgaaagcagtagtagttctccctcggttgagaactccaactttgagttacctgtcatcccaacaaagcgtccccgtaccaaacgccggcgtctctcaaacatcagcctgctttactctattccttttatccttacttcaccggcttttcaaaaatttcagaggatggatttctccaaatcagatatacaaacacagccttctggggaattattatgcaagttcaaaaagaagcagaggaaaaaggatattcccctgccgactaacaaaattgagatgaagagatcctcatcacaggagtcagttgcacccagaaaatgcttgcattgtgaggtgacaaagacgccgcaatggagagaaggaccaatgggtcctaagaccctatgcaatgcctgtggggttcgataccggtctggccggctctttgctgaataccggcctgcatctagccccacttttgtagcatcactgcactcaaactctcacaagaaggtcttagaaattaggaacagagccacccaggtgactgttagatagctcgagacccagctttcttgtacaaagtggtgataaattggagctctgcagagctttcgttcgtatcatc

SEQ ID NO: 96 - DNA, 774 bp, Glycine max
ttcttgtttgttgattaacccttaattaatccgggcgcgcctgatttatcacaagtttgtacaaaaaagcaggctcctgcaggaccatgagctctcgggcaggcaagggacctgccgtcagaagttatcggaggagaaagacagcgttggaccttgaccttaaccgtgtaccagctggtgagaatcgtgagcaggagggaccttcgactcagtcggtgcctcgagaagttcaagttgaacagcagcagcaggctactcaacctccgatgattgacgtggaagccattgatgatgatgttgttgaatgtaccccaagggcttttgctgaggctaaaaacaattcaagaagagttcgtaggaggactatagttgatgttgatctagaagatcagactaggcgcaacaaacgccgaagagaattgccaaatctgattattaattgtgataagtatataaatttggaaggcggtagcagttccatggagcaaagttttaaaaagccacctgaacctccaaaggagcttgtcttcaactgtccaatatgtatgggccctatggtacatgaaatgtcgacaagatgtggtcatattttttgcaaggattgcatcaaagctgctataagtgctcagggtaaatgccctacctgtagaaaaaaggttgttgcgaaagatcttataagggtgtatctcccatcgactagttagctcgagacccagctttcttgtacaaagtggtgataaattggagctctgcagagctttcgttcgtatcatc

SEQ ID NO: 97 - DNA, 891 bp, Glycine max
ttcttgtttgttgattaacccttaattaatccgggcgcgcctgatttatcacaagtttgtacaaaaaagcaggctcctgcaggaccatggggagaggaagggtgcagttgaagaggatcgagaacaagatcaataggcaagtgacgttctcaaagagaaggtctggtttgctcaagaaagcacatgagatctctgtgcattgtgatgctgaagtggccctcatagtcttctccaccaaaggcaaactctttgagtactccagcgatccctgtatggaaaaaattcttgaacggtatgagaggtattcatatgcagagaggcagcttgttgcaagtgatcaaccactaactgaaaattggactctggaacatgcaaagctgaaagcaaggttggaagtcctacagaaaaatcaaaggaattttatgggacaagatttggagggcctaagtatcaaagagcttcagaatttggagcatcagcttgaaagtgctctcaaacacattagatcacggaagaaccaactgatgtatgaatctatttcagagcttcataaaaaggataaggccctacaagaacaaaacaacactctcgctaagaagataaaggagaaagagaaggcactagcccaacaggcacaactggagcgacttggtgatgaagtggatctgacttcctctgcccttgttccccaaccactggtgacatcaaacattagaacctcctcacaaatcagaggtgaaggagataacgaaggaaccccaactccaacccaagctaatgccattcttccaccttggatgcttcgtcctacaaatgaatagctcgagacccagctttcttgtacaaagtggtgataaattggagctctgcagagctttcgttcgtatcatc

SEQ ID NO: 98 - DNA, 1053 bp, Glycine max
ttcttgtttgttgattaacccttaattaatccgggcgcgcctgatttatcacaagtttgtacaaaaaagcaggctcctgcaggaccatggacgaattagaagaaaccctactcacccaaatcgactgggaatcgttcctcgacgacatacctgaacttaacgtcgatgattttttgcaggacgacaacgccgttcctgttgttaccgacaatcattcctccccgaacgacgaccccgttttgtccgagatcgagaacatgctcatgacgcaggccgaaaacgacgctgtcgttttgcccgagacgccgtcttcggaggccgggtattacaagctcttcgaggagattctggtggaggagcccaaggaaggacccgtgagcccgccttcaaaaatagagtccgaggaaggctccgacaaagacaagaccgatgatgctgcttccgatgaacccatgtcgaagaaattaaagaggcagttgaggaacagggatgctgctgtgaggtcaagggagaggaagaagttgtatgtgaaaaaccttgagatgaagagtaggtacctagaaggggaatgcagaagactggggcatttgctccagtgctgctatgctgagaacaacgctttgcggctttgcttgcaattgcgtggtatatatggtgcttcaatgaccatgcaggagtctgctgtgctcttgttggaacctctgctgttgggttccctgctgtggtgcatgggcatcatatgccatctcagtctgcctctaatgctgtgggttgcagcagtacttccaagagaaaacatcgagcagaagggcctaagaagggtaactcaaaaaggatcagaaagtaagatctctgagtgtttccagatgcaatcatttttaaagagtagaaaaagccgagcttcaagaacaaagatgaaattcaattttatagtgttctaatgttctataacttctgaagtgggggctctaaggttttctattctcgagacccagctttcttgtacaaagtggtgataaattggagctctgcagagctttcgttcgtatcatc

SEQ ID NO: 99 - DNA, 861 bp, Glycine max
ttcttgtttgttgattaacccttaattaatccgggcgcgcctgatttatcacaagtttgtacaaaaaagcaggctcctgcaggaccatggagggtcatcatctccatcaccggcaacaacaattacaacaacatcaccaccctcatcacaacatcacaactagtaacgtggatgccacggataggttcccccaatggagcatccaagagaccaaagagttcctcgtgatccgtgccgagctggatcagactttcatggagacaaagaggaacaaacagctttgggaagtcatctccaaccggatgaaggaaaagggtttccatagaagtgcagaacagtgcaagtgcaagtggaaaaacctcgttacccgctacaagggatgtgaaacgatggagccggaagcgatgaggcagcaattcccgttctacaacgagcttcaagcgattttcgcggcgagaatgcagagaatgttgtgggcggaagcagaaggagggtccaataataagaagaaggggatgcacctttcttccgacgacgaggaagaaggcaatgaagagatgatgagcgagggggatcacaagggtaacatcatcatcagcaagaagaacaagaagaagggaaagatggtaattggcgtcggagggagtggtaacaacaacaataatagtagtagtagtagtaacaacttggagagggaagaacaaagaaggattagggaagaagttagggctgataagagagatgctctaatcactgctcttcttaacaagctcagaagagaagagatgtagctcgagacccagctttcttgtacaaagtggtgataaattggagctctgcagagctttcgttcgtatcatc

SEQ ID NO: 100 - DNA, 1312 bp, Glycine max
ttcttgtttgttgattaacccttaattaatccgggcgcgcctgatttatcacaagtttgtacaaaaaagcaggctcctgcaggaccatgatcaacagcacaaaagaagctgattttccactaaaacaagaaggtctttcatcaggtgatcatgaaaaggctaaggctccatcgacctcatcatcatcatcacaatggctaaaactgaaggatccaaggattgttcgtgtgtctcgagccttcggaggaaaagacaggcacagcaaggtgtgcacaataagagggctaagagatagaagagtgaggctttcagtccctacagcaattcacctctatgatctccaagataggcttggactcaaccaaccaagcaaggttgttgattggttgctcaatgcagcaaaacatgaaattgatgaacttccaccacttcctattcctccaggtaacttcacccttggttatccctctcttgtttcttgtaatgaagttagcacctctcgtgaaggttcaggccagaacactttattgtggaaaccaaaatcaggagaaatggttagtgatgataaagcaaattggatgaatagaagtgaaggagatgatgataataatcataataatagtaatggtaaagaaggaagcaataataatatttgtcatggtggtacacttgttttgccaaataatctcttgccaagaccaaaccatccttcttttttgagcttgatgaacattatgccatcacttggttaccaatgggaggctaataattcagctcatgatgttaatattggtcaatggcaaaaccatggatttcttaaccaaacagatgtacacagcatcaatgtggttccatttccatcaacattggctctatcaactgggagtgatactactactacttctcagattttggtgtgtcctcctcatggagcaacaacacagccatatttcccttcttcacatcatgttgcagcaatggagatgaatgcaagacaaatcaaccactatcagatgctgagttcaagttctcatcaaaatctcttggcaaattctctcaatccatcatcacagcaactcatgagccaatcagagaaattgccattcagcttgggaattaggcctaaacttttccattctcctaacagaagtgaaagccattcccaaaaagaccaggatttgccttccaagtgatgcacaaatagtgcaaaataaagttgtcaaaatttcttctcctcacaagctcgagacccagctttcttgtacaaagtggtgataaattggagctctgcagagctttcgttcgtatcatc

SEQ ID NO: 101 - DNA, 852 bp, Glycine max
ttcttgtttgttgattaacccttaattaatccgggcgcgcctgatttatcacaagtttgtacaaaaaagcaggctcctgcaggaccatggcatttcagcactacatttcccgggatttgaaaaccatcccaaatgctgcgactgagacagaaaactccaatggttgttttgattgcaacatctgcctagactttgcacatgagccggtggtgaccctatgtggccacctctactgctggccatgcatctacaagtggctccatgtccaaagtgattctcttgcacctgatgagcatccacaatgccccgtttgcaaggcagatatatccaatagcacaatggtcccactctatggccgtggccatgccgccacagctgaaggcaaaacatcttcttgtgatgtttttataccaccaagaccatctgcttcatgtgttcaagcccttttggcaacatcatctcaaaggggtcagcaccttccatatcgtaatccttatcagggtcactacttcagctctcatccataccaagaagaggatgatgccacttcacaaatgctcaatcttggatcccaccaccaccctgtgactgggatgtttggggagatggtttatgccagagtgtttggcaacccagaaaatttgtatgcataccccaattcttatcagctgatgggaagtgccacccctagattgagaaggcaagagatgcaggcacacaaatctttgaacagaatttctatttttctcttttgctgcttccttctttgtcttgttgtcttctaactcgagacccagctttcttgtacaaagtggtgataaattggagctctgcagagctttcgttcgtatc

SEQ ID NO: 102 - DNA, 2199 bp, Glycine max
ttcttgtttgttgattaacccttaattaatccgggcgcgcctgatttatcacaagtttgtacaaaaaagcaggctcctgcaggaccatgtgcagtgattcgaaaagtaaactttcttccccaaccctcgtcgtcatggagaatagtaacattcagaagcagaatctggatggtctctacaactcggttttgcttgaattgtctgcatctgatgattatgaagctttcaaaagagaggtggaggaaaaaggcttagatgtgaacgaggcaggcttttggtacggtagaagaattgggtcaaagaagatgggatctgaaacgaggacccctctgatgattgcttctttgtttggaagcgccaaggtgctcaattatattcttcttcagaaaggaggaggtgttgatgtgaacagggtctgtggttctgatagggccactgctctccattgtgctgttgctggtggctccgaatcctcacttgagattgtcaagctcttgcttgatgctggggctgatgctgagtgccttgatgcgagtggcaacaagccggttaatctgattgctcctgcctttgattctttgtccaaatcgcgaaggaaggctttggagatgttcctcaggggtggtggggaaagagatgaactcatgagccaggagatggagctacagatgttttctgttccagagaaaaaagaaggaagtgataataagaaagaataccctgttgatatatcgctgcctgacatcaacaacggtgtatatggaacagatgagtttaggatgtacaacttcaaggtgaagccttgctcaagggcttactcccatgactggactgagtgtccattcgttcatccaggggagaatgcgaggaggagagacccacggaaatacccttacagctgtgttccttgccctgagttccgcaaagggacctgccagaagggtgattcctgcgagtatgctcatggtgtttttgagtcctggctacatcccgcccaataccggacaaggctttgcaaggatgagacgggctgtgctagaaaagtatgcttctttgctcacaaacctgaagagctaccccctgtgtatgcttccactgggtcggctatgccatcaccaaaatcctattcagctagtggacttgacatgacagcgatgagtccattggctcttagttccacatctttgccgatgccaactgtttcaaccccacccatgtctcccttggcagcagcttcatctcccaagagtggaagcatgtggcagaacaaaataaaccttactccaccatcgttgcagctccctggtagccgactgaaggctgctttgagtgccagggatctggagatggagatggaactgctcggtctagaaagccctgctcgccaacaacagcagcagcagcaacaattgatcgaagagattgccaggatctcttccccatctttccggagcaaggaattcaataggattgttgatttgaatcctactaaccttgatgacctgttagcatctgctgacccttctgtattttctcaactacatggactttctgtgcaaccttcaacacccacacaaagtgggcttcagatgcgccaaaacatgaaccacctccgtgcgagttatccatccaacatcccttcctctcctgtgaggaagccctcagcttttgggtttgactcatcagctgctgtggcaactgcagtgatgaattctaggtctgctgccttcgcaaagcgaagccaaagtttcattgatcgtggagctgcaacccaccatcttgggctgtcttcagcttccaactcttcttgcagggtatcctctaccctttcagattggagttcccctaccgggaaactggattggggtgtaaacggagacaagctgaacaagctgaggaaatctacttcctttggattcagaaacagtggggtaactgcatcccccatagcacagcctgaatttggtgctgagccggatgtctcatgggttcattcattggttaaagatgttccctccgagaggtctgagatatttggtgctgagaagcaacaatatgatctcagtaaagagatgcttccaccatggatggagcagctgtatatagagcaggagcagatggtagcatgactcgagacccagctttcttgtacaaagtggtgataaattggagctctgcagagctttcgttcgtatcatc

SEQ ID NO: 103 - DNA, 1478 bp, Glycine max
ttcttgtttgttgattaacccttaattaatccgggcgcgcctgatttatcacaagtttgtacaaaaaagcaggctcctgcaggaccatgggaagacactcttgttgctacaaacagaagttacggaaaggcctttggtctccagaggaagacgagaagcttctcaatcacatcaccaaacatggtcatggatgttggagctcggttcccaaactagctggtttgcagagatgtgggaagagctgcaggttgaggtggataaattatctaaggcctgatttgaagagaggagcattctcacagcaagaagagaacatgattgttgaacttcatgcagttcttggaaacaggtggtctcagattgcagcacagttaccaggaagaacagacaatgagattaagaacctatggaactcgtgcctgaagaagaagctgaggcaaagaggcattgacccaaccacacacaagccactctctgaggttgagaacgacaaggacatgaatatgatgccaccctcaaccgacaaaagcactcagaaagcctctgtgggatccaatgaagtagtgagtaatttggttgatcatcatcagccaccaaaaaccatgcctaattcttcatcagagagataccctcttgaagtttccactactagttccacccaggaactgttcctagataggtttggcaccaccaccaccacctgccacgaaaacaacaacaacacttctgatttggtaggatcatacttctccttccagcacttgaactatggaacaacaacaagcatggccctctcttcaaaccccaacacctctctttgtttcattctaccctccacttcttcagacattaataataacaactccatcataacctcctcctccatgctcccttcaattttcccaacacaacatgtgaagctccaatctaataacaacaacccttcttccatttcatctgatggggttcaaaactgggaaacaagtaacaacacaaacaaaaacaatgggaatatgcagttacaaagtagcacaaactaccttgacagcacgtggggggtggcagagtctatgaagattgttaacattaacaaagaggctcaagtagtgcctctacaagcagaacaagaagatctaaaatggtctgagtatcttaacaccccgtttattctgggaaacaacacaacgcagaatcatcaaattcaaacctctcaatctatctacactgaggttattaaaccagaaacaggtttcataatagacgagtcatgtactagtaattggcaccatcatcagccaccaccagcttttcaactttccgatatatatagcaaggatctgcagagattttcagtgactttcggacaaaccctgtaacgtgtgtgtacgtaattaatatatgtggaaacttcaattcaacgaactcgagacccagctttcttgtacaaagtggtgataaattggagctctgcagagctt

SEQ ID NO: 104 - DNA, 897 bp, Glycine max
ttcttgtttgttgattaacccttaattaatccgggcgcgcctgatttatcacaagtttgtacaaaaaagcaggctcctgcaggaccatgtcgaactccgacgccaccactaacggcgtcagtaacggcgccatcattgatgcgcagagacagcaggccttagccgttaagaagccgccgtctaaggaccgtcacagcaaggtggacggccgagggcgccgcataaggatgccaatcatatgcgccgcacgtgtgttccagctcacgcgcgagcttggccacaagtccgacggtcaaaccatcgagtggctcctccgccaggccgagccctccatcatcgccgccaccggctccggaaccacccccgccagcttctcctccgtctccctctccgtccgcgccgccgccaactccctctcctccccttcctccacctccgaccacaagccccagttactctctcccactcccttcatcctcggcaagcgcatacgcaccgacgaagactcttccaaagacgaagctgtctccgtggggccctctcttgtgggcccttctactcctcccggactgtgggccctcccggcccggcccgatttcggacaaatttggagcttcgccgccgccgctgctcccgaaatggtgtcggtgtcgcagcagcagcaggcttcattgttcgctcatcaccaccgtcagcagcagcagcaagccatcggagaagcttcggcggcgagggtgggaaattaccttcctggacatctgaatttgctcgcctcattgtctggtggacctgggaattctggtcggagagacgatgagcctcgttgactcgagacccagctttcttgtacaaagtggtgataaattggagctctgcagagctttcgttcgtatcatc

SEQ ID NO: 105 - DNA, 786 bp, Glycine max
ttcttgtttgttgattaacccttaattaatccgggcgcgcctgatttatcacaagtttgtacaaaaaagcaggctcctgcaggaccatgacaacagcagaagaaacttcaaacttggatctcatacgccaacacctattaggggaaaatatcatctcagactcctcctttttctccaatctccttcatcatcctatgaaacttgaagcaccctcatcaccagaatttgatttcacctcatatatctcagacaacacaagctttttcactttccttgaaggctatgatttgatggcagacatgaaatttgttgattcagacaacaccatcccttcaaaggaggttaagaaatgcaatatttctcctgaaccattggtgtcatcaaaagagaagccaaagaagttagaatacgataaggcaaagcgttataggggagttagaagaaggccttggggaaaatttgctgctgaaatccgtgaccctacaaggaaagggacaagggtttggcttggaacctttgacagtgaaattgatgcagctaaggcctatgattgtgctgctttcaagatgagggggcagaaggctattctgaacttccctcttgaggctggactgtctgatcctaagcctaacagttgtggcaggaaaaggagaagagagagccatgatcatgaattggagctgccacaagtccaagttcatcatggtgtttcctgactcgagacccagctttcttgtacaaagtggtgataaattggagctctgcagagctttcgttcgtatcatc

SEQ ID NO: 106 - DNA, 1471 bp, Glycine max
ttcttgtttgttgattaacccttaattaatccgggcgcgcctgatttatcacaagtttgtacaaaaaagcaggctcctgcaggaccatggagaacaacgcattcagagatcaaatcatggaggacaatgaacatgaagaaatgcctgattcctttgtttgctgcgtttgtctggatctattatacaagcccattgtgctatcttgtggtcacatgtgctgtttctggtgtgtctataattcaatgagttgtctgcgggagtctcaatgtccagtatgtaggaatcaatactatcacttcccaacagtttgccaattgcttcactttttgcttctcaagatctataccgctgcttacaagagaagggaaagccaaactcttgaggaagaaaagaaatcaggattctactcccctcaatttgatcctgatacatgtgaatcacaagctaagtttggtcattctggtatccctagttcatcctctattttgaatttgacgtccaactcatgcaatgtgggaacttctgaatgtctggagcaatcagggtcaactgccaatgaaggagatgaaggcaccatcttttcgaaccgagagcctgatattattggaactcctgctaaaggaaaaaaattgcctcaggaagagctttctctacaacagaaattatcagttgcagatgtgacatgtacaatgtgcaagcaactgctctttcatcctgtagttcttaattgtggtcatgtgtactgtcaaatttgtgtcatcaacatagatgacgagatgctcagatgtaaagtttgtcaaagtccacatcctagaggattaccaaaagtgtgtttggagttggatcactttttggaggaacaatttcctgaagaatatggacagcggagagatgccattgaactacagcaaatcaaagtcaaacctgacaccccttcttcttgttcattggatggtggtaagaaaccagaaaatacagattggtggtctgatcctgactcaaaagttcacattggagttggttgcgatttttgcgggatgtttccaataattggagatagatatagatgcattgactgtaaggagaagatgggctttgatctttgtggtgattgctacgcaagccgctccaagcttcctggtcgatttaatcaacaacacacctcagagcacaagttcaagcttgtacaacccaacattattcataacataatgttgaggctggccacagcacagttaggggaaggttcgattgacctggagtctataggaaacatagaagttacttcagacggcgctgcattgtttggtgatggagaagataaccacaatgattctgaagccgccaattgaaaaattgagctcaacaaaagtccattgtctaaaaattggtgttttggtgctcgagacccagctttcttgtacaaagtggtgataaattggagctctgcagagctttcgttcgtatcatc

SEQ ID NO: 107 - DNA, 1512 bp, Glycine max
ttcttgtttgttgattaacccttaattaatccgggcgcgcctgatttatcacaagtttgtacaaaaaagcaggctcctgcaggaccatgttagacaacaacaattgcagtgcttctaattctggtgcaccatcttcttctgatgccgcctttgcattatctgaaaatggggtggctaacaacaaaaggaaaagaagacccgcaggcacacccgatccagatgctgaggttgtgtctctctcaccaaccaccttgctggaatctgacagatacgtgtgtgagatctgcaaccaagggttccagagggaccagaatcttcaaatgcacaggaggaggcacaaggtgccatggaagctgctaaagagggaaacagcacaaggggggcatcagaagaagagggtgtttgtgtgccctgagccaacttgtttgcaccatgacccttgccatgcccttggggaccttgtgggaatcaagaagcacttcagaaggaagcacagcaatcacaagcagtgggtctgtgacaagtgttccaaagggtatgctgttcaatctgattacaaggctcacatcaaaacctgtggcaccaggggccattcctgtgactgtggccgtgtcttttccagggtggagagtttcatagaacaccaagatgcatgcactgtccggcagcaccggccagagttacaagcacttcaaccagcatgctcttcaagaacagcttcaagcgcaagtccctctagtgaggcaaattttagcatagccccaccattgcaaggacttccagtactgccaaaaccagctgaacaacaacaacaaccagcaacaacaacagtcttattaacttcagagatacacggtaacaagtccactacctcgcataacttagaacttcagctcttaccctcctcaacaaactctcaagcaaaacgaaatacaaaggaaaactatggcttgaaactttcaataggctcatgtagtaacgacaaagggaatagtagtgaaccaccagagagagcatgttcagaagcacataggagcccacctgaaaggaataataataataataataacaatgtgagtgactattccacgttggaagtggcaaggttgcaggagtttgcaggagaggaactcaagttggccattgcagaaaaggcttatgcagaagaggctagaagagaggccaaacgtcaaattgagatagctgaacttgagtttgagaatgccaaaaggataaggaaacaagcacaagctgaactttcaagggctgaagagctgagaaagcaagccatcaagaagataggttccactgttatggaaatagcatgtcatacttgcaagcaacagtttcagtcttcaactgttggggtgccatcatcagaagaaacctccattgtgatgagttacatgtcctcagccaccacagaaggagaagcagaatgactcgagacccagctttcttgtacaaagtggtgataaattggagctctgcagagctttcgttcgtatcatc

SEQ ID NO: 108 - DNA, 860 bp, Glycine max
ttgttgattaacccttaattaatccgggcgcgcctgatttatcacaagtttgtacaaaaaagcaggctcctgcaggaccatgaggaagggcagaggtggaggcgcctcggcggcggcggtggatgtgaacggatccattttaaaggagcctcggtaccggggcgtgaggaagagaccgtgggggagattcgccgcggagatcagagacccgttgaagaaagccagggtttggttgggaaccttcaattctgccgaggatgctgctcgtgcctacgacgccgccgctcggactctccgaggtcccaaggccaaaacaaatttcccccctctctcacctttttgctatccacaccccaccaccgatcctttcttctacactggtttccacgatcaacaccaccaccacaacaacaacaaccttaacaaccctcaaagacccacttcaagtggcatgagtagcaccgttgagtccttcagtgggccccgccctcccaccaccaccactaccaccacaaccacaactgcgacgccgtttttgactgctacgcggagatacccgcgcactccccctcttgtccctgaagactgccacagtgactgcgactcttcctcctccgtcgttgacgacggcgacgacaacatcgtttcgtcgtcgtttcgacctcccttgccgtttgatctcaacgcgctgccgtttgatgatgctgccgcggatgatgatctacgccgcaccgcgctttgtctctgatgatgattatcgtgcgatgatgatttttaatttctcatttttctcgagacccagctttcttgtacaaagtggtgataaattggagctctgcagagctttcgttcgtatcatc

SEQ ID NO: 109 - DNA, 804 bp, Glycine max
ttcttgtttgttgattaacccttaattaatccgggcgcgcctgatttatcacaagtttgtacaaaaaagcaggctcctgcaggaccatggctcgcggaaaggttcagctgaagcgaattgagaaccctgtgcacaggcaagttaccttctgcaagcgccgagctgggcttcttaagaaggctaaggagctctctgtgctgtgcgatgctgaaattggccttttcattttctccgcccatggaaagctctatgaactagccaccaaaggaaccatgcaagggctcattgagaggtacatgaagttcacacgaggggctcagcctgaagcagcagcacctgaagcacatcctcttctggttgctaaagaggaaactaacgcgctaaaacaagaaatccaaacattgcaaaagggtatcagttatttgtttgaaggaggaaataagactatggcaattgatgaattacaactgctagagaagaatctcgaaacttggatataccatattcgttcaatgaagatgaacattatgttacaagaaattcaagctttgaaagataaggagggaacacttaaagcggcaaataaatatctccatgacaagattgtggagaatactgcgatttctaactttgctgaatttgctactgatacttcttacccactaattgtacaagatgggggttttcaactctattaaatgggttgtttctacaatgttttgtttacatgctttctcgagacccagctttcttgtacaaagtggtgataaattggagctctgcagagctttcgttcgtatcatc

SEQ ID NO: 110 - DNA, 1105 bp, Arabidopsis thaliana
ggcaggagtttgtcaaccgtttctccattcggattggtttcagatacaaagttacagtctacattttcaatttatcctccacactctgagatcaaccaccattctagtagtgaagctcttatgcaaatggattccgcacagaatcagttcaacaaacgtgctcgattgtttgaagatcctgaactcaaagatgctaaggtcatttatccatcgaaccctgaatctactgaaccagtgaataaaggttatggcggttctacagccatccaaagctttttcaaagaatctaaagctgaagaaacgcccaaggtacttaagaagagaggaaggaagaagaagaatcctaatcccggtaagtatcagagacagactcttaattacgtattaacttttgtttcagaggagagtcaaaagatttattgttttggtatgtgcagaggaagtaaactcttcaactcccggtggagatgactcagagaaccgctcaaagttctacgagagtgcttctgctagaaagagaactgtaactgcagaggaaagagagagagccgtcaatgcagccaaaacattcgaaccaacaaatccttactttagagttgttctgcgaccatcatatctatacagaggttgcatcatggtaaacaatttttaaagattgtaattaaggttcaagattagggttaacatgacctgttcttgctgacttcttcgtttctgttttttgtttgttcaacagtacttgccatctgggtttgctgagaaatacctaagtgggatatctggtttcatcaagctccagctcggtgagaaacaatggccagtgaggtgcctctacaaagcagggagagctaagtttagccaaggatggtatgagttcacactcgagaacaatataggcgaaggagatgtatgtgtgtttgagctactcagaactcgggatttcgttctcgaagtcaccgcctttcgtgtcaatgagtatgtgtgaccaaaaaagatttccctttcatcagcgatcttgcaggtagctttccaaagttaaaattttatgtaggggtctcttaaccattctctctcttgcattggttgtctctgttctagtagtgtt

SEQ ID NO: 111 - DNA, 496 bp, Arabidopsis thaliana
ttaattaagatggaagagatacaacaacaaacgcagaaggaagaacaaaagcaccgtgaagaagaagaggaggaagaggaaggtccgcctccgggatgggaatctgcagttcttcctcctccaatcgtcaccatcaccgccgccgtaaaccccaatcccaccaccgtagaaattcccgaaaaggcccaaatggtatgtggatcttgcaggcgtttgctttcttatctaagaggatccaaacatgttaagtgctcctcttgtcagactgttaatctcgttcttgaagctaaccaggttggtcaggtgaattgcaacaattgcaaactgctactgatgtatccttatggagctccagctgttagatgttcctcctgcaattctgtcacagatatcagtgaaaacaacaaacgacctccatggtctgagcagcaaggaccactcaaaagtttaagcagtctcaggagagcagagaattaaacttgaaccgaggcgcgcc

SEQ ID NO: 112 - DNA, 538 bp, Arabidopsis thaliana
ttaattaattctcccttgtagactttcatttgcagcaaaaatagtttctcatatggagaggcaaatcataaacaggaagaaacgagtgttttctcttgaaccaaacaagaaccctagtgcagttttcacgagaaaatacacaagccacttggttcctgcactcaagaagctcaacatgaacaagaactcttcaaaacaaaccgtgaagcatgaagtagatatggctttggctttgtctgctcaagaatttgcatggagccgtttcttgctgcagaagctatcgtcctcatcgaatccaaccactaccactagttcttcttccgatggaattcggattcttgaaagacccgataaagaaggcggaaacgaagaaggagggatagaggagagactgagggaattgaagaagcttttgccaggtggggaagagatgaatgtggaagaaatgttgagtgagattggtaactacattaaatgtcttgagttgcagacgattgctctcaagtccattgttcaagatagtacttgacggcgcgcc

SEQ ID NO: 113 - DNA, 1689 bp, Arabidopsis thaliana
gtgtgttaaatcaacaaaaccacacgtgattaaatcataataggtatatagacacaccacacaaaagacaacatcaaaaatcacacaaatcaagattgtcaaacacactaagagagaaagatggataacttttttctaggtttgagttgtcaagaagaaaacaacttctgggatctaatcgtggccgacatctcgggtgatagaagcgtcagtgtacctatcagaagcgcctttaggtcatatatgaaggacacggaactgaggatgatgtcgccgaagatatcttcttcgaaggtgaacgtgaagaagagaatggtcaatcttctgagaaagaattgggaggagaagaaaaatacggtggctccagagaaggaaagaagccggcgacatatgttgaaagaaaggacgagaagagagaaacaaaaacagagttacttagctctccattctctactaccatttgccactaaggtaccttgattatttgtgtaatattaaacttgaaacgaactttatttttcttaatgacttggaaagaaaatcatagtagttctaacaaaaatccgaatttttacagttcaaaatggcacacaaaattagatattcggtagaaatggattagattcatggatactaaattttcagaatttcgactactatgtctgttcactgatctttgatgtttgtatgcttaattacatgcattgatctggttttagaagcttatcttaaatatctataaatttatattgagtaaggtataatataaagttttgagtatgataaatttccaactacaatcatttgtataaaatgtttgtaagtttttgcactggaatcttttcttttatcactattttcttttacttaaggattttgatatagaaacaagtttaaagaacatcatagattgatatcgaaacaagtttcaagaccatcatttctccttatattctcattttatttcagaatgacaaaaattcgattgtcgaaaaagccgtggatgagattgcgaaattacaaagattaaagaaagaactagtgagaagaattaaagtgattgaggaaaaatcagcaaaggatggtcatgatgaaatgagtgaaacaaaggttagggttaatctaaaagaacctttgtctggactagattcaatgcttgaagcgcttcattatcttaaatcaatgggaacaaaactgaaaacagtccatgccaatttctctcctcaagagttttctgcgaccatgaccatcgagactcaggtacatatttaattcgattcgaattggttgaatccggttttggtttctctttggttatgacaacttgacaagtacataaaggtaataataggtaggttgttttgtgttagtagcaaaaaaaaagtagatggttgtatgtttttttaattaagtagttagatctgtattagtgtgatgatattaaatttaaagttaactttttggcagattagaggagaggaggttgaaaagagagtggaaagaagactccaggaaactgaatggaaacttctctttctcccagaagcttccttttacaaagactactaattctgttgactttctgtcattaattttcttttgtatttaaatttgtatatagttaaatacttaaattaactggtcattgctttattgacacacataaagaaaaataatggggcacactac

SEQ ID NO: 114 - DNA, 1972 bp, Arabidopsis thaliana
ttaactatatataaacccaatgaaatgaaaacaaaaacacacaaaacacaaacacgcaaaccaaaagagatcaaaccaataatcaaaatactcctcattatatcagaaaaaaaaaaaaaaatgggatcttcatcaaagaacatcgaacaagctcaagattcttatctcgagtggatgagtttgcaatctcaacgcatccctgagctcaaacaactcttagctcaacgacgatctcacggtgatgaagataatgataacaagcttcgtaagttaacgggaaaaatcatcggtgatttcaaaaattacgccgcaaaaagagctgatcttgctcaccgatgtagctcgaactattatgcacccacgtggaacagtcctttagagaacgctctaatttggatgggtggttgtcgaccatcttctttctttaggctcgtttatgctttgtgtgggtcacaaactgagatccgtgtgactcagtttctccgcaacatcgacggctacgaatcttcaggtaagggtttggacgttttcggttatttcggttttgaggaataaaaaaatagactaaatttaattttttggttcggtagtcagtacggtgcggcaaaaaattttattgtcttccttccgatttctaaaatttatttattctgttcattttgcttatgacaaaaataatagattcttaggttttatattaagttgggttcggtttgaatttggaatttgttcagttctatatattatacaaatatattattatttttaaataaaattaatcataaaaaatgattccgaaccatagatctataccaaaattctaatggtttcggttcggttggttcaatatggtttggtttgacaggtggtggcggcggtgcatcacttagcgacttaagtgcggagcagctagctaaaatcaatgtgttgcatgtaaaaattatagacgaagaagagaagatgaccaagaaagtctcaagcctacaagaagacgcagcggatattcccatcgccactgtggcttacgagatggagaatgtcggagagcctaacgtagtggtggatcaagctctcgacaagcaagaagaagctatggctcgtttattggtcgaggccgataatctaagggttgatactttagcgaagatcctcgggattctatctccggtacaaggagcggatttcttgctcgctgggaaaaagcttcatctttcgatgcatgagtggggaactatgagagatcgtcgccgtcgtgactgtatggttgacaccgaaggtaatgccggaggagaggaaggaaagtagtcgttattatattagatatgatactataggtacgtacgtgtcatatttaaaattgcataataacaaggttttcaatcttgatattataaagttatatatttggcatatattctagggatatataacccgtatgtgtgttacttttattttctgaagacttatggtagcaaggtgcaatgcgttatgttagtttatattataaataattaagattttgctttgtataagatggatcttttgttttttattaaatgcagaaatatagttttatatataatcttatataataattattgtttcgttataagattgtagtttgtaaggataaaaaataaccttttttttggttaatggataagaaatcatttataagttacattttgatgttttaaattttatcacttatcgaagatatatttgaattattctattttttatagtttattcacgtcgtggcattttgcgaaatacagtaatattcgatgcatgtacaactgtgaatagtggcccacgccccacggagacgacaaataatgagagaaattgagatttgtgtgtttacgtggcagcaacatgatctcgtctcgacaagtcagctaggagatttttatccaagattgcattggatttttatattcttagatttttccattattattttgtgtgg

SEQ ID NO: 115 - protein, 218 aa, Arabidopsis thaliana
MDPFLIQSPFSGFSPEYSIGSSPDSFSSSSSNNYSLPFNENDSEEMFLYGLIEQSTQQTYIDSDSQDLPIKSVSSRKSEKSYRGVRRRPWGKFAAEIRDSTRNGIRVWLGTFESAEEAALAYDQAAFSMRGSSAILNFSAERVQESLSEIKYTYEDGCSPVVALKRKHSMRRRMTNKKTKDSDFDHRSVKLDNVVVFEDLGEQYLEELLGSSENSGTW

SEQ ID NO: 116 - protein, 373 aa, Arabidopsis thaliana
MAARKLGSLLRQYFFSLCFLFLGCFFFPKDADYKQKRRKKKLRRVSSSSGSSLSSSWTYLKRVFLSTTRISKSRNQTHPNVTLTSARSSQNSLVTLVQPDTTNQPDPETRIHQQTEFEISSSDEIFPCNSCGEIFPKINLLENHIAIKHAVSELIAGESSTNIVKIIFKSGWPEQGNYKSPVINRILKIHNSSKILTRFEEYREFVKAKAARSNGGGRRWDDERCVADGNELLRFYCSTFMCDLGQNGKSNLCGHQYCSICGIIGSGFSPKLDGIATLATGWRGHVAVPEEVEEEFGFMNVKRAMLVCRVVAGRVGCDLIDDDDVDKSDGGGYDSLVGQSGNKSGALLRIDDDELLVFNPRAVLPCFVIVYTV

SEQ ID NO: 117 - protein, 242 aa, Arabidopsis thaliana
MMMRAEEDNYNLNPPPWLIPMLRANYFIPCSIHAASNKSECNMFCLDCSSEAFCSYCLLNHRNHRVLQIRRSSYHNVVRVNEIQKYIDISCVQTYIINSARIVFLNERPQPRIGKGVTNTCEICCRSLLDSFRFCSLGCKLGGMKRDPSLTFSLRGKHGREYEGEWESDEATTPTKIRKTCAFNRLMSGLSISTVKCDYLSGDQPSSSSGDESGFKLSPGTPPIYNHRNSSRRKGVPHRAPF

SEQ ID NO: 118 - protein, 380 aa, Arabidopsis thaliana
MTFRSLLQEMRSRPHRVVHAAASTANSSDPFSWSELPEELLREILIRVETVDGGDWPSRRNVVACAGVCRSWRILTKEIVAVPEFSSKLTFPISLKQSGPRDSLVQCFIKRNRNTQSYHLYLGLTTSLTDNGKFLLAASKLKRATCTDYIISLRSDDISKRSNAYLGRMRSNFLGTKFTVFDGSQTGAAKMQKSRSSNFIKVSPRVPQGSYPIAHISYELNVLGSRGPRRMRCIMDTIPMSIVESRGVVASTSISSFSSRSSPVFRSHSKPLRSNSASCSDSGNNLGDPPLVLSNKAPRWHEQLRCWCLNFHGRVTVASVKNFQLVAVSDCEAGQTSERIILQFGKVGKDMFTMDYGYPISAFQAFAICLSSFETRIACE

SEQ ID NO: 119 - protein, 617 aa, Arabidopsis thaliana
MAIETQLPCDGDGVCMRCQVNPPSEETLTCGTCVTPWHVPCLLPESLASSTGEWECPDCSGVVVPSAAPGTGNARPESSGSVLVAAIRAIQADETLTEAEKAKKRQKLMSGGGDDGVDEEEKKKLEIFCSICIQLPERPITTPCGHNFCLKCFEKWAVGQGKLTCMICRSKIPRHVAKNPRINLALVSAIRLANVTKCSVEATAAKVHHIIRNQDRPEKAFTTERAVKTGKANAASGKFFVTIPRDHFGPIPAENDVTRKQGVLVGESWEDRQECRQWGAHFPHIAGIAGQSAVGAQSVALSGGYDDDEDHGEWFLYTGSGGRDLSGNKRINKKQSSDQAFKNMNESLRLSCKMGYPVRVVRSWKEKRSAYAPAEGVRYDGVYRIEKCWSNVGVQGSFKVCRYLFVRCDNEPAPWTSDEHGDRPRPLPNVPELETAADLFVRKESPSWDFDEAEGRWKWMKSPPVSRMALDPEERKKNKRAKNTMKARLLKEFSCQICREVLSLPVTTPCAHNFCKACLEAKFAGITQLRERSNGGRKLRAKKNIMTCPCCTTDLSEFLQNPQVNREMMEIIENFKKSEEEADASISEEEEEESEPPTKKIKMDNNSVGGSGTSLSA

SEQ ID NO: 120 - protein, 181 aa, Arabidopsis thaliana
MEGQRTQRRGYLKDKATVSNLVEEEMENGMDGEEEDGGDEDKRKKVMERVRGPSTDRVPSRLCQVDRCTVNLTEAKQYYRRHRVCEVHAKASAATVAGVRQRFCQQCSRFHELPEFDEAKRSCRRRLAGHNERRRKISGDSFGEGSGRRGFSGQLIQTQERNRVDRKLPMTNSSFKRPQIR

SEQ ID NO: 121 - protein, 242 aa, Arabidopsis thaliana
MCALVPPLYPNFGWPCGDHSFYETDDVSNTFLDFPLPDLTVTHENVSSENNRTLLDNPVVMKKLNHNASERERRKKINTMFSSLRSCLPPTNQTKKLSVSATVSQALKYIPELQEQVKKLMKKKEELSFQISGQRDLVYTDQNSKSEEGVTSYASTVSSTRLSETEVMVQISSLQTEKCSFGNVLSGVEEDGLVLVGASSSRSHGERLFYSMHLQIKNGQVNSEELGDRLLYLYEKCGHSFT

SEQ ID NO: 122 - protein, 194 aa, Arabidopsis thaliana
MERDDCRRFQDSPAQTTERRVKYKPKKKRAKDDDDEKVVSKHPNFRGVRMRQWGKWVSEIREPKKKSRIWLGTFSTAEMAARAHDVAALAIKGGSAHLNFPELAYHLPRPASADPKDIQAAAAAAAAAVAIDMDVETSSPSPSPTVTETSSPAMIALSDDAFSDLPDLLLNVNHNIDGFWDSFPYEEPFLSQSY

SEQ ID NO: 123 - protein, 162 aa, Arabidopsis thaliana
MKIQCEVCEKAEAEVLCCSDEAVLCKPCDIKVHEANKLFQRHHRVALQKDAASATTASGAPLCDICQERKGYFFCLEDRAMLCNDCDEAIHTCNSHQRFLLSGVQVSDQSLTENSECSTSFSSETYQIQSKVSLNSQYSSEETEAGNSGEIVHKNPSVILSP

SEQ ID NO: 124 - protein, 197 aa, Arabidopsis thaliana
MARLLFRLLVESNTPSPAIDNSTAALNSDLVVILAALLCALICVLGLIAVSRCVWLRRLAAGNRTVSGSQTQSPQPPVAAANKGLKKKVLQSLPKLTFSPESPESEKFAECAICLAEFSAGDELRVLPQCGHGFHVACIDTWLGSHSSCPSCRQILVVARCHKCGGLPGSSSSGLESEPEIEIRIKQGEDDPNSFLP

SEQ ID NO: 125 - protein, 268 aa, Arabidopsis thaliana
MHYPNNRTEFVGAPAPTRYQKEQLSPEQELSVIVSALQHVISGENETAPCQGFSSDSTVISAGMPRLDSDTCQVCRIEGCLGCNYFFAPNQRIEKNHQQEEEITSSSNRRRESSPVAKKAEGGGKIRKRKNKKNGYRGVRQRPWGKFAAEIRDPKRATRVWLGTFETAEDAARAYDRAAIGFRGPRAKLNFPFVDYTSSVSSPVAADDIGAKASASASVSATDSVEAEQWNGGGGDCNMEEWMNMMMMMDFGNGDSSDSGNTIADMFQ

SEQ ID NO: 126 - protein, 456 aa, Arabidopsis thaliana
MATNADPAPTKKPRNSRKALKQKNELVETPPSPVSVKGKSAKSFEQDLMEMQTMLEKMKIEKDKTEELLKEKDEILRKKEEELETRDAEQEKLKVELKKLQKMKEFKPNMTFACGQSSLTQAEQEKANKKKKKDCPETKRPSSSYVLWCKDQWTEVKKENPEADFKETSNILGAKWKSLSAEDKKPYEERYQVEKEAYLQVIAKEKREKEAMKLLEDDQKQRTAMELLDQYLNFVQEAEQDNKKKNKKEKDPLKPKHPVSAFLVYANERRAALREENKSVVEVAKITGEEWKNLSDKKKAPYEKVAKKNKETYLQAMEEYKRTKEEEALSQKKEEEELLKLHKQEALQMLKKKEKTDNLIKKEKATKKKKNENVDPNKPKKPASSYFLFSKDERKKLTEERPGTNNATVTALISLKWKELSEEEKQVYNGKAAKLMEAYKKEVEAYNKKSAATTSS

SEQ ID NO: 127 - protein, 185 aa, Arabidopsis thaliana
MTRPSRLLETAAPPPQPSEEMIAAESDMVVILSALLCALICVAGLAAVVRCAWLRRFTAGGDSPSPNKGLKKKALQSLPRSTFTAAESTSGAAAEEGDSTECAICLTDFADGEEIRVLPLCGHSFHVECIDKWLVSRSSCPSCRRILTPVRCDRCGHASTAEMKDQAHRHQHHQHSSTTIPTFLP

SEQ ID NO: 128 - protein, 396 aa, Arabidopsis thaliana
MSLFCNSIETLYPKPFLSHKSHFFTFSNSKFQNPKFTSFPLRHQWRIESCLKSASSSEIDMVRNKEGIFAPKEKKVVVLWDLDNKPPRGPPYEAATALRKVAEKLGRVVEISAYANRHAFIHLPHWVVEERRERRNLDFMERKGEVTPIDPYICGVCGRKCKTNLDLKKHFKQLHERERQKKVNRMRSLKGKKRQKFKERYVSGNEKYNEAARSLLTPKVGYGLEAELRRAGVYVKTVEDKPQAADWAVKRQIQHSMTRGIDWLVLVSDDKDFSDMLRKAREADLGTLVVSDMDRALGRHADLWVPWSGVEKGEIGEKDLIPGKRPRFEEDEVGFGGNDELFSLSYDEDEKAEMTVESDGFGRFNVSAFSEDEWVEDEGDFVLSDSSDDDSDDELF

SEQ ID NO: 129 - protein, 312 aa, Arabidopsis thaliana
MESVELTLKNSNMKDKTLTGGAQNGDDFSVDDLLDFSKEEEDDDVLVEDEAELKVQRKRGVSDENTLHRSNDFSTADFHTSGLSVPMDDIAELEWLSNFVDDSSFTPYSAPTNKPVWLTGNRRHLVQPVKEETCFKSQHPAVKTRPKRARTGVRVWSHGSQSLTDSSSSSTTSSSSSPRPSSPLWLASGQFLDEPMTKTQKKKKVWKNAGQTQTQTQTQTRQCGHCGVQKTPQWRAGPLGAKTLCNACGVRYKSGRLLPEYRPACSPTFSSELHSNHHSKVIEMRRKKETSDGAEETGLNQPVQTVQVVSSF

SEQ ID NO: 130 - protein, 379 aa, Arabidopsis thaliana
MDLTGGFGARSGGVGPCREPIGLESLHLGDEFRQLVTTLPPENPGGSFTALLELPPTQAVELLHFTDSSSSQQAAVTGIGGEIPPPLHSFGGTLAFPSNSVLMERAARFSVIATEQQNGNISGETPTSSVPSNSSANLDRVKTEPAETDSSQRLISDSAIENQIPCPNQNNRNGKRKDFEKKGKSSTKKNKSSEENEKLPYVHVRARRGQATDSHSLAERARREKINARMKLLQELVPGCDKIQGTALVLDEIINHVQSLQRQVEMLSMRLAAVNPRIDFNLDTILASENGSLMDGSFNAAPMQLAWPQQAIETEQSFHHRQLQQPPTQQWPFDGLNQPVWGREEDQAHGNDNSNLMAVSENVMVASANLHPNQVKMEL

SEQ ID NO: 131 - protein, 256 aa, Arabidopsis thaliana
MGKQINIESSATHHQDNIVSVITATISSSSVVTSSSDSWSTSKRSLVQDNDSGGKRRKSNVSDDNKNPTSYRGVRMRSWGKWVSEIREPRKKSRIWLGTYPTAEMAARAHDVAALAIKGNSGFLNFPELSGLLPRPVSCSPKDIQAAATKAAEATTWHKPVIDKKLADELSHSELLSTAQSSTSSSFVFSSDTSETSSTDKESNEETVFDLPDLFTDGLMNPNDAFCLCNGTFTWQLYGEEDVGFRFEEPFNWQND

SEQ ID NO: 132 - protein, 319 aa, Arabidopsis thaliana
MAIPQRNKRKARSSPERLTQPPELPHNSDVPSSSSSSAADNFFSWSTKQFAFPPGYRFVPKDQELIFHYLKPFSQGNKCSLLNVPIHRVNIYESNPQHLSEKYEKGNDKDWFYISERTKTGKAGRSNKRVDNGGYWSATVAAQKINAGNGIVGYKTSLEYYVGKQSNSVKGDWLMQEYWFESSDDNNNEKVDHALCKIYLTPAAAKKKKAEEAENEKLKKEEDVEQLDLNQPDQLQLQQPHDIVYQPQYCLLPEHHQPQPFPDNFSELISFQQQPVMIPDDFEDFLAEFTKPHSLDGDEEFNNYGLFEGFFDTEGMIKH

SEQ ID NO: 133 - protein, 409 aa, Arabidopsis thaliana
  misc_feature (63)..(63): Xaa can be any naturally occurring amino acid
MSQVRDTPVKLFGWTITPVSHDPYSSSSHVLPDSSSSSSSSSLSLRPHMVCFMVLPLFVKKCXRFNIFSSPCISLKLVHDVNPNPSSFNFFQMNNQSVTDNTSLKLSSNLNNESKETSENSDDQHSEITTITSEEEKTTELKKPDKILPCPRCNSADTKFCYYNNYNVNQPRHFCRKCQRYWTAGGSMRIVPVGSGRRKNKGWVSSDQYLHITSEDTDNYNSSSTKILSFESSDSLVTERPKHQSNEVKINAEPVSQEPNNFQGLLPPQASPVSPPWPYQYPPNPSFYHMPVYWGCAIPVWSTLDTSTCLGKRTRDETSHETVKESKNAFERTSLLLESQSIKNETSMATNNHVWYPVPMTREKTQEFSFFSNGAETKSSNNRFVPETYLNLQANPAAMARSMNFRESI

SEQ ID NO: 134 - protein, 145 aa, Arabidopsis thaliana
MEGYDNGSLYAPFLSLKSHSKPELHQGEEESSKVRSEGCSKSVESSKKKGKKQRYAFQTRSQVDILDDGYRWRKYGQKAVKNNKFPRSYYRCTYGGCNVKKQVQRLTVDQEVVVTTYEGVHSHPIEKSTENFEHILTQMQIYSSF

SEQ ID NO: 135 - protein, 192 aa, Arabidopsis thaliana
MSPQRMKLSSPPVTNNEPTATASAVKSCGGGGKETSSSTTRHPVYHGVRKRRWGKWVSEIREPRKKSRIWLGSFPVPEMAAKAYDVAAFCLKGRKAQLNFPEEIEDLPRPSTCTPRDIQVAAAKAANAVKIIKMGDDDVAGIDDGDDFWEGIELPELMMSGGGWSPEPFVAGDDATWLVDGDLYQYQFMACL

SEQ ID NO: 136 - protein, 315 aa, Arabidopsis thaliana
MKVRSFISLKVEKSFQKKKKNTPKETMSTDSSQFEVVPANASALDNDVSSHMSMLYQDIVRNPELFWEMLRDFHESSDKKFKCKEVIDAFNFKTTITNSAFVLRKSYLKMLFEFEHLYYFQAPLSTFWEKDSQELKPGTVITGIIDGKFESGYLISTKVGSEKLKGMLYHISPETKRGKKKAKSSQGDSHKPPKRQRTGYNFFVAEQSVRIKAENAGQKVSSPKNFGNMWTNLSESDRKVYYEKSREDGKRYKMEILQYRSLMESRVAEIVAATDAGTSASAAETADEASQENLAKTDACTSASSAAETEDEVSQ

SEQ ID NO: 137 - protein, 220 aa, Arabidopsis thaliana
  misc_feature (27)..(27): Xaa can be any naturally occurring amino acid
MDARKRGRPEAAASHNSNGGFKRSKQXTSGCPFGDNCHFLHYVPGGYNAAAQMTNLRPPVSQVSRNMQGSGGPGGRFSGRGDPGSGPVSIFGASTSKISVDASLAGAIIGKGGIHSKQICRETGAKLSIKDHERDPNLKIIELEGTFEQINVASGMVRELIGRLGSVKKPQGIGGPEGKPHPGSNYKTKICDRYSKGNCTYGDRCHFAHGESELRRSGIA

SEQ ID NO: 138 - protein, 284 aa, Arabidopsis thaliana
MAPRQKKPNKSDDDDGDLHRKKQSFFKQRFPGFKKKASELSVLCGNSVGFICYGPDNDLHVWPQSQDHNPQALHEIVAKFNALSDERRKNHACDLNDFPHHLKGLSREELRKHLLHLDSQLLGVREQKIEILKKTLTGSSEKDGARVSENSAISDHKLKIEPNLTDILSEDHLIRVSDKKLGSCDVFDELAYVVRGSRNLNENVSNYESKDAAYTGMDHLGTFGGNYLQEAAAELYQTYNLGNFCDDHVWDLEFASRLPPLHTFSDPLMTTNTCQTMSSDMISI

SEQ ID NO: 139 - protein, 304 aa, Arabidopsis thaliana
MGAINQGISLFDESQTVINPINTNHLGFFFSFPSHSTLSSSSSSSSSSPSSLVSPFLGHNSLNSFLHNNPSSFISHPQDSINLMTNLPETLISSLSSSKQRDDHDGFLNLDHHRLTGSISSQRPLSNPWAWSCQAGYGSSQKNNHGSEIDVDDNDDEVGDGGGINDDDNGRHHHHDTPSRHDKHNTASLGVVSSLKMKKLKTRRKVREPRFCFKTLSEVDVLDDGYRWRKYGQKVVKNTQHPRSYYRCTQDKCRVKKRVERLADDPRMVITTYEGRHLHSPSNHLDDDSLSTSHLHPPLSNFFW

SEQ ID NO: 140 - protein, 334 aa, Arabidopsis thaliana
MESLINPSHGGGNYDSHSSSLDSLKPSVLVIILILLMTLLISVSICFLLRCLNRCSHRSVLPLSSSSSVATVTSDSRRFSGHRVSPETERSSVLDSLPIFKFSSVTRRSSSMNSGDCAVCLSKFEPEDQLRLLPLCCHAFHADCIDIWLVSNQTCPLCRSPLFASESDLMKSLAVVGSNNGGGENSFRLEIGSISRRRQTPIPESVEQHRTYSIGSFDYIVDDVDSEISESNFNRGKQEDATTTTATATAVTTNPTSFEASLAADIGNDGSRSWLKDYVDRLSRGISSRAMSFRSSGRFFTGSSRRSEELTVMDLEANHAGEEISELFRWLSGV

SEQ ID NO: 141 - protein, 245 aa, Arabidopsis thaliana
MDYSSMHQNVMGVSSCSTQDYQNQKKPLSATRPAPPEQSLRCPRCDSTNTKFCYYNNYSLSQPRYFCKSCRRYWTKGGILRNIPIGGAYRKHKRSSSATKSLRTTPEPTMTHDGKSFPTASFGYNNNNISNEQMELGLAYALLNKQPLGVSSHLGFGSSQSPMAMDGVYGTTSHQMENTGYAFGNGGGGMEQMATSDPNRVLWGFPWQMNMGGGSGHGHGHVDQIDSGREIWSSTVNYINTGALL

SEQ ID NO: 142 - protein, 232 aa, Arabidopsis thaliana
MDNFNVVANEDNQVNDVKPPPPPPRVCARCDSDNTKFCYYNNYSEFQPRYFCKNCRRYWTHGGALRNVPIGGSSRAKRTRINQPSVAQMVSVGIQPGSHKPFFNVQENNDFVGSFGASSSSFVAAVGNRFSSLSHIHGGMVTNVHPTQTFRPNHRLAFHNGSFEQDYYDVGSDNLLVNQQVGGYVDNHNGYHMNQVDQYNWNQSFNNAMNMNYNNASTSGRMHPSHLEKGGP

SEQ ID NO: 143 - protein, 160 aa, Arabidopsis thaliana
MDNSENVLFNDQNENFTLVAPHPSSSYLTRDQEHEIMVSALRQVISNSGADDASSSNLIITSVPPPDAGPCPLCGVAGCYGCTLQRPHREVKKEKKYKGVRKKPSGKWAAEIWDPRSKSRRWLGTFLTAEMAAQSYNDAAAEYRARRGKTNGEGIKRRWR

SEQ ID NO: 144 - protein, 243 aa, Arabidopsis thaliana
MEYSQSSMYSSPSSWSSSQESLLWNESCFLDQSSEPQAFFCPNYDYSDDFFSFESPEMMIKEEIQNGDVSNSEEEEKVGIDEERSYRGVRKRPWGKFAAEIRDSTRNGIRVWLGTFDKAEEAALAYDQAAFATKGSLATLNFPVEVVRESLKKMENVNLHDGGSPVMALKRKHSLRNRPRGKKRSSSSSSSSSNSSSCSSSSSTSSTSRSSSKQSVVKQESGTLVVFEDLGAEYLEQLLMSSC

SEQ ID NO: 145 - protein, 616 aa, Arabidopsis thaliana
MALKSSSADGKTRSSVQIFIVFSLCCFFYILGAWQRSGFGKGDSIALEMTNSGADCNIVPSLNFETHHAGESSLVGASEAAKVKAFEPCDGRYTDYTPCQDQRRAMTFPRDSMIYRERHCAPENEKLHCLIPAPKGYVTPFSWPKSRDYVPYANAPYKALTVEKAIQNWIQYEGDVFRFPGGGTQFPQGADKYIDQLASVIPMENGTVRTALDTGCGVASWGAYLWSRNVRAMSFAPRDSHEAQVQFALERGVPAVIGVLGTIKLPYPTRAFDMAHCSRCLIPWGANDGMYLMEVDRVLRPGGYWILSGPPINWKVNYKAWQRPKEDLQEEQRKIEEAAKLLCWEKKYEHGEIAIWQKRVNDEACRSRQDDPRANFCKTDDTDDVWYKKMEACITPYPETSSSDEVAGGELQAFPDRLNAVPPRISSGSISGVTVDAYEDDNRQWKKHVKAYKRINSLLDTGRYRNIMDMNAGFGGFAAALESQKLWVMNVVPTIAEKNRLGVVYERGLIGIYHDWCEAFSTYPRTYDLIHANHLFSLYKNKCNADDILLEMDRILRPEGAVIIRDDVDTLIKVKRIIAGMRWDAKLVDHEDGPLVPEKVLIAVKQYWVTNSTSTH

SEQ ID NO: 146 - protein, 238 aa, Arabidopsis thaliana
MALETLTSPRLSSPMPTLFQDSALGFHGSKGKRSKRSRSEFDRQSLTEDEYIALCLMLLARDGDRNRDLDLPSSSSSPPLLPPLPTPIYKCSVCDKAFSSYQALGGHKASHRKSFSLTQSAGGDELSTSSAITTSGISGGGGGSVKSHVCSICHKSFATGQALGGHKRCHYEGKNGGGVSSSVSNSEDVGSTSHVSSGHRGFDLNIPPIPEFSMVNGDEEVMSPMPAKKLRFDFPEKP

SEQ ID NO: 147 - protein, 234 aa, Arabidopsis thaliana
MGRGKIVIRRIDNSTSRQVTFSKRRSGLLKKAKELSILCDAEVGVIIFSSTGKLYDYASNSSMKTIIERYNRVKEEQHQLLNHASEIKFWQREVASLQQQLQYLQECHRKLVGEELSGMNANDLQNLEDQLVTSLKGVRLKKDQLMTNEIRELNRKGQIIQKENHELQNIVDIMRKENIKLQKKVHGRTNAIEGNSSVDPISNGTTTYAPPQLQLIQLQPAPREKSIRLGLQLS

SEQ ID NO: 148 - protein, 204 aa, Arabidopsis thaliana
MQDPAAYYQTMMAKQQQQQQPQFAEQEQLKCPRCDSPNTKFCYYNNYNLSQPRHFCKSCRRYWTKGGALRNVPVGGGSRKNATKRSTSSSSSASSPSNSSQNKKTKNPDPDPDPRNSQKPDLDPTRMLYGFPIGDQDVKGMEIGGSFSSLLANNMQLGLGGGGIMLDGSGWDHPGMGLGLRRTEPGNNNNNPWTDLAMNRAEKN

SEQ ID NO: 149 - protein, 364 aa, Arabidopsis thaliana
MFSRFVLKSWRPKTQTTSLNSIKGFSFSSSSINPKPKIRVGVWWDLDNKPPASFPPYDAAVKLRTAASSFGTVKLMMAYANRHAFSYVPLEVREQRKDRKLLNKLENKGLVKPPEPYFCGVCDRRFYTNEKLINHFKQIHETENQKRMRQIESSKGHRRVRLVAKYSMKIEKYKRAARNVLTPKEGYGLADELKRAGFWVKMVSDKPDAADKALKEHLVEVMDKREVECVVLVSDDSDFAGILWEAKERCLRTVVIGDSNEGALKRVADVAYSWKEVTMGKAKKEVEKVVGKWKDRDVLKKLEWTYDPALEKERGGSCGVWDYEFDYDDEIENGTEVEPVEIGDGVDWWKIDTEDGVGSSRTCR

SEQ ID NO: 150 - protein, 320 aa, Arabidopsis thaliana
MSNPTRKNMERIKGPWSPEEDDLLQRLVQKHGPRNWSLISKSIPGRSGKSCRLRWCNQLSPEVEHRAFSQEEDETIIRAHARFGNKWATISRLLNGRTDNAIKNHWNSTLKRKCSVEGQSCDFGGNGGYDGNLGEEQPLKRTASGGGGVSTGLYMSPGSPSGSDVSEQSSGGAHVFKPTVRSEVTASSSGEDPPTYLSLSLPWTDETVRVNEPVQLNQNTVMDGGYTAELFPVRKEEQVEVEEEEAKGISGGFGGEFMTVVQEMIRTEVRSYMADLQRGNVGGSSSGGGGGGSCMPQSVNSRRVGFREFIVNQIGIGKME

SEQ ID NO: 151 - protein, 323 aa, Arabidopsis thaliana
MDRRNPFQHHHHHHQLHHHLIQQQQLPPPPLSTTATMDPGGGGGGGERIPQWSIEETKELLAIREELDQTFMETKRNKLLWEVVAAKMADKGFVRSAEQCKSKWKNLVTRYKACETTEPDAIRQQFPFYNEIQSIFEARMQRMLWSEATEPSTSSKRKHHQFSSDDEEEEVDEPNQDINEELLSLVETQKRETEVITTSTSTNPRKRAKKGKGVASGTKAETAGNTLKDILEEFMRQTVKMEKEWRDAWEMKEIEREKREKEWRRRMAELEEERAATERRWMEREEERRLREEARAQKRDSLIDALLNRLNRDHNDDHHNQGF

SEQ ID NO: 152 - protein, 548 aa, Arabidopsis thaliana
MSSSSNPPVCSPEKEERSEMKIEIQCMENKQPLAASCSSASEGSGCFFLKSPEIATPATVSSFPRRTSGPMRRAKGGWTPEEDETLRRAVEKYKGKRWKKIAEFFPERTEVQCLHRWQKVLNPELVKGPWTQEEDDKIVELVKKYGPAKWSVIAKSLPGRIGKQCRERWHNHLNPGIRKDAWTVEEESALMNSHRMYGNKWAEIAKVLPGRTDNAIKNHWNSSLKKKLEFYLATGNLPPPASKFIVLKDIADGDRDSKQSSATKPFKDSDSLTQTSSGNTDSNEVGRDHFDSSSALLEEVAASRRIGVNEYACSPVEYKPQLPNLEPISEEVRINSKAYFERSIQRKVENGFGTPKHGNLYYKSPLDYYFPSEADLQHMYGYECGCSPGAASPVSLMTTPCNKDSGLTATRSPESFLREAARTFPNTPSIFRKRRKVVLAAKTDAVVVVNGVVKEVDRKEESKDMRKSLLLETTDNCSDDEELGLNGNAFNLSPPYRLRAKRTAVIKSRQLEFTSEKEKQPDNEIEFTSAKEKQPDNEIKTSEEDKPV

SEQ ID NO: 153 - protein, 172 aa, Arabidopsis thaliana
MGRRKIKMEMVQDMNTRQVTFSKRRTGLFKKASELATLCNAELGIVVFSPGGKPFSYGKPNLDSVAERFMREYDDSDSGDEEKSGNYRPKLKRLSERLDLLNQEVEAEKERGEKSQEKLESAGDERFKESIETLTLDELNEYKDRLQTVHGRIEGQVNHLQASSCLMLLSRK

SEQ ID NO: 154 - protein, 381 aa, Arabidopsis thaliana
MRLNGDSGPGQDEPGSSGFHGGIRRFPLAAQPEIMRAAEKDDQYASFIHEACRDAFRHLFGTRIALAYQKEMKLLGQMLYYVLTTGSGQQTLGEEYCDIIQVAGPYGLSPTPARRALFILYQTAVPYIAERISTRAATQAVTFDESDEFFGDSHIHSPRMIDLPSSSQVETSTSVVSRLNDRLMRSWHRAIQRWPVVLPVAREVLQLVLRANLMLFYFEGFYYHISKRASGVRYVFIGKQLNQRPRYQILGVFLLIQLCILAAEGLRRSNLSSITSSIQQASIGSYQTSGGRGLPVLNEEGNLITSEAEKGNWSTSDSTSTEAVGKCTLCLSTRQHPTATPCGHVFCWSCIMEWCNEKQECPLCRTPNTHSSLVCLYHSDF

SEQ ID NO: 155 - protein, 156 aa, Arabidopsis thaliana
MMSTISPVFSTEPGLLTSVLPAFETSFTPWDISHLFSVFDSLIDPKPVSTHDYGSVNQIGSDMSPTDNTDERKKKRKLSNRESAKRSREKKQKHLEEMSIQLNQLKIQNQELKNQLRYVLYHCQRTKMENDRLLMEHRILHDKLLNIRQVLMFRQT

SEQ ID NO: 156 - protein, 485 aa, Arabidopsis thaliana
MDLSAKDEFSAEKRNPDNYDSVNNPSGDWRVDSYPSENLISAGPASCSPSQMMDSFGQTLWYDPTSVQAVGYAGFNGGNASSSSFRGSIDRSLEMGWNLPNLLPPKGNGLFLPNASSFLPPSMAQFPADSGFIERAARFSLFSGGNFSDMVNQPLGNSEAIGLFLQGGGTMQGQCQSNELNVGEPHNDVSVAVKESTVRSSEQAKPNVPGSGNVSEDTQSSGGNGQKGRETSSNTKKRKRNGQNSEAAQSHRSQQSEEEPDNNGDEKRNDEQSPNSPGKKSNSGKQQGKQSSDPPKDGYIHVRARRGQATNSHSLAERVRREKISERMKFLQDLVPGCNKVTGKAVMLDEIINYVQSLQRQVEFLSMKLATVNPQMDFNLEGLLAKDALQLRAGSSSTTPFPPNMSMAYPPLPHGFMQQTLSSIGRTITSPLSPMNGGFKRQETNGWEGDLQNVIHINYGAGDVTPDPQAAATASLPAANMKVEP

SEQ ID NO: 157 - protein, 547 aa, Arabidopsis thaliana
MKRGYGETWDPPPKPLPASRSGEGPSMADKKKADDDNNNSNMDDELLAVLGYKVRSSEMAEVAQKLEQLEMVLSNDDVGSTVLNDSVHYNPSDLSNWVESMLSELNNPASSDLDTTRSCVDRSEYDLRAIPGLSAFPKEEEVFDEEASSKRIRLGSWCESSDESTRSVVLVDSQETGVRLVHALVACAEAIHQENLNLADALVKRVGTLAGSQAGAMGKVATYFAQALARRIYRDYTAETDVCAAVNPSFEEVLEMHFYESCPYLKFAHFTANQAILEAVTTARRVHVIDLGLNQGMQWPALMQALALRPGGPPSFRLTGIGPPQTENSDSLQQLGWKLAQFAQNMGVEFEFKGLAAESLSDLEPEMFETRPESETLVVNSVFELHRLLARSGSIEKLLNTVKAIKPSIVTVVEQEANHNGIVFLDRFNEALHYYSSLFDSLEDSYSLPSQDRVMSEVYLGRQILNVVAAEGSDRVERHETAAQWRIRMKSAGFDPIHLGSSAFKQASMLLSLYATGDGYRVEENDGCLMIGWQTRPLITTSAWKLA

SEQ ID NO: 158 - protein, 335 aa, Arabidopsis thaliana
MREDDSDWFARWEEELPSPEELMPISQSLISPDLALAFDIRTPNHGNGNSNQPHHHHHHQTTPPTPSQLQLPSSQANSSAEFAADSADLGSGGAAGDEPARTLKRPRLVWTPQLHKRFVDAVAHLGIKNAVPKTIMQLMSVDGLTRENVASHLQKYRLYLKRMQGLSSGGGAGSDPATDRLFASSPVPAHFLHPNRVPSSDHFMPSFVPIATLQQQQQMAAAAAAAAAANPHLQPPQFHRQIAAAHFGSPTNGGFSSPTSNGQFGSPTSNGFGSPTTNGKFDPSFLAVRQTQQQPIQRMSTPSLHSPVSNYVEDLESANANGGRTVLTLFPTRDD

SEQ ID NO: 159 - protein, 510 aa, Arabidopsis thaliana
MLLEETEPPNQTLDHVLSWLEDSVSLSPLPGFDDSYLLHEFDGSQTWEWDQTQDPEHGFIQSYSQDLSAAYVGCEATNLEVVTEAPSIDLDLPPEIQQPNDQSRKRSHDGFLEAQQVKKSARSKRKAIKSSEKSSKDGNKEGRWAEKLLNPCALAITASNSSRVQHYLCVLSELASSSGDANRRLAAFGLRALQHHLSSSSVSSSFWPVFTFASAEVKMFQKTLLKFYEVSPWFALPNNMANSAILQILAQDPKDKKDLHIIDIGVSHGMQWPTLLEALSCRLEGPPPRVRITVISDLTADIPFSVGPPGYNYGSQLLGFARSLKINLQISVLDKLQLIDTSPHENLIVCAQFRLHHLKHSINDERGETLKAVRSLRPKGVVLCENNGECSSSADFAAGFSKKLEYVWKFLDSTSSGFKEENSEERKLMEGEATKVLMNAGDMNEGKEKWYERMREAGFFVEAFEEDAVDGAKSLLRKYDNNWEIRMEDGDTFAGLMWKGEAVSFCSLWK

SEQ ID NO: 160 - protein, 435 aa, Arabidopsis thaliana
MKDAEKREVIASSSLQRKRNRGRRLRKRRRRNEKRVLMVPSSLPNDVLEEIFLRFPVKALIRLKSLSKQWRSTIESRSFEERHLTIAKKAFVDHPKVMLVGEEDPIRGTGIRPDTDIGFRLFCLESASLLSFTRLNFPQGFFNWIYISESCDGLFCIHSPKSHSVYVVNPATRWLRLLPPAGFQILIHKFNPTEREWNVVMKSIFHLAFVKATDYKLVWLYNCDKYIVDASSPNVGVTKCEIFDFRKNAWRYLACTPSHQIFYYQKPASANGSVYWFTEPYNERIEVVAFDIQTETFRLLPKINPAIAGSDPHHIDMCTLDNSLCMSKREKDTMIQDIWRLKPSEDTWEKIFSIDLVSCPSSRTEKRDQFDWSKKDRVEPATPVAVCKNKKILLSHRYSRGLVKYDPLTKSIDFFSGHPTAYRKVIYFQSLISHL

SEQ ID NO: 161 - protein, 531 aa, Arabidopsis thaliana
MDTLFRLVSLQQQQQSDSIITNQSSLSRTSTTTTGSPQTAYHYNFPQNDVVEECFNFFMDEEDLSSSSSHHNHHNHNNPNTYYSPFTTPTQYHPATSSTPSSTAAAAALASPYSSSGHHNDPSAFSIPQTPPSFDFSANAKWADSVLLEAARAFSDKDTARAQQILWTLNELSSPYGDTEQKLASYFLQALFNRMTGSGERCYRTMVTAAATEKTCSFESTRKTVLKFQEVSPWATFGHVAANGAILEAVDGEAKIHIVDISSTFCTQWPTLLEALATRSDDTPHLRLTTVVVANKFVNDQTASHRMMKEIGNRMEKFARLMGVPFKFNIIHHVGDLSEFDLNELDVKPDEVLAINCVGAMHGIASRGSPRDAVISSFRRLRPRIVTVVEEEADLVGEEEGGFDDEFLRGFGECLRWFRVCFESWEESFPRTSNERLMLERAAGRAIVDLVACEPSDSTERRETARKWSRRMRNSGFGAVGYSDEVADDVRALLRRYKEGVWSMVQCPDAAGIFLCWRDQPVVWASAWRPT

SEQ ID NO: 162 - protein, 263 aa, Arabidopsis thaliana
MNSCQQKAMEKLLHGHGCANQLLIMDQTESDSSMEREDLAKSVLHCFSDALSILIDTNDHQDDQSNNSSPQDSSPVLESSRKPLHKRGRKTSMAESSDYHRHESSTPIYHDGFLWRKYGQKQIKESEYQRSYYKCAYTKDQNCEAKKQVQKIQHNPPLYSTTYFGQHICQLHQAYATFPIDTSDFEEHEGSHMIRFGHPNISFSSSTSNLRQHQNHQDRIKDEYMKPVIAEDWSPSQWMSSEVALAVEAFEFNPFWTSHDLSS

SEQ ID NO: 163 - protein, 404 aa, Arabidopsis thaliana
MEEKGEISPSGVVTVKGDEALVPRTEFQQNPSFLQFVSPTTVVTPLPPPPAPSSAPVPTTVTPGSATASTGSDPTKKKRGRPRKYAPDGSLNPRFLRPTLSPTPISSSIPLSGDYQWKRGKAQQQHQPLEFVKKSHKFEYGSPAPTPPLPGLSCYVGANFTTHQFTVNGGEDVTMKVMPYSQQGSRAICILSATGSISNVTLGQPTNAGGTLTYEGRFEILSLSGSFMPTENGGTKGRAGGMSISLAGPNGNIFGGGLAGMLIAAGPVQVVMGSFIVMHQAEQNQKKKPRVMEAFAPPQPQAPPQLQQQQPPTFTITTVNSTSPSVNTVEEQKPQAYGGGIVRPMAQMPSSFQNDNSTMNNFTPAYHGYGNMNTGTTHKEEHEDEDGGDDDDDSGDTRSQSHSG

SEQ ID NO: 164 - protein, 658 aa, Arabidopsis thaliana
MLAGCSSSSLLSPTRRLRSEAVAATSATVSAHFPMNTQRLDLPCSSSFSRKETPSSRPLGRSISLDNSNNNNNKPIERKTKTSGCSLKQNIKLPPLATTRGNGEGFSWNNDNNNRGKSLKRLAEEDESCLSRAKRTKCENEGGFWFEHFTGQDSSSPALPFSLTCSGDDEEKVCFVPSEVISQPLPNWVDSVITELAGIGDKDVESSLPAAVKEASGGSSTSASSESRSLSHRVPEPTNGSRNPYSHRGATEERTTGNINNNNNRNDLQRDFELVNLLTGCLDAIRSRNIAAINHFIARTGDLASPRGRTPMTRLIAYYIEALALRVARMWPHIFHIAPPREFDRTVEDESGNALRFLNQVTPIPKFIHFTANEMLLRAFEGKERVHIIDFDIKQGLQWPSFFQSLASRINPPHHVRITGIGESKLELNETGDRLHGFAEAMNLQFEFHPVVDRLEDVRLWMLHVKEGESVAVNCVMQMHKTLYDGTGAAIRDFLGLIRSTNPIALVLAEQEAEHNSEQLETRVCNSLKYYSAMFDAIHTNLATDSLMRVKVEEMLFGREIRNIVACEGSHRQERHVGFRHWRRMLEQLGFRSLGVSEREVLQSKMLLRMYGSDNEGFFNVERSDEDNGGEGGRGGGVTLRWSEQPLYTISAWTTGGN

SEQ ID NO: 165 - protein, 430 aa, Arabidopsis thaliana
MEDRRLVHGAAPPLTAVERFLYGQKNDALCSKKQESSRDQPIVKTKISIETRSDNKENTTFGPTREKHLVLNGGNRNPTGEVVARSAARDYQNSTKKRSSKNLIKGQWTAEEDRKLIRLVRQHGERKWAMISEKLEGRAGKQCRERWHNHLRPDIKKDGWSEEEERVLVESHMRIGNKWAEIAKLIPGRTENSIKNHWNATKRRQNSKRKHKRESNADNNDRDASPSAKRPCILQDYIKSIERNNINKDNDEKKNENTISVISTPNLDQIYSDGDSASSILGGPYDEELDYFQNIFANHPISLENLGLSQTSDEVTQSSSSGFMIKNPNPNLHDSVGIHHQEATITAPANTPHLASDIYLSYLLNGTTSSYSDTHFPSSSSSTSSTTVEHGGHNEFLEPQANSTSERREMDLIEMLSGSIQGSNICFPLV

SEQ ID NO: 166 - protein, 374 aa, Glycine max
LIKSNWLWDLHLEMKDRQRWRAEEDALLRAYVKQYGPREWNLVSQRMNTPLNRDAKSCLERWKNYLKPGIKKGSLTEEEQRLVINLQATHGNKWKKIAAQVPGRTAKRLGKWWEVFKEKQQRETKGNNCTIDPINDSKYEHILESFAEKLVKERPSTSTSTSFVMATSNSSFLHADAPAPAPALLPSWLSNSNGTAPVRPPSPSVTLSLSPSTVAAPPPWMQPPVRGQDNASPLVLGNVAPHGAVLAFGENMVMSELVECCKELDEVHHALAGHKKEAAWRLSRVELQLESEKAGRRREKMEEIEAKIKALREEQTAALDRIEAEYREQLAGLRRDAESKEQKLAEQWAAKHLRLTKFLEQVGCRSRLTEPNGR

SEQ ID NO: 167 - protein, 234 aa, Glycine max
MVSPENSNWLFDYPLIDDDVIPVGDSSFAVSASTFSWPPPPANVSVEIDASLGDSDGLKNPALKKRTKSDSSTASSSKACREKLRRDRLNDKFVELGSILEPGRPPKTDKASILIDAARMVTQLRDEALKLKDSNTSLQEKIKELKAEKNELRDEKQRLKAEKEKLEVQVKSMNAQPAFLPPPPAIPAAFAPQGQAPGNKLVPFISYPGVAMWQFMPPAAVDTSQDHVLRPPVA

SEQ ID NO: 168 - protein, 233 aa, Glycine max
MALEALQSPRTATPSFSPFEETNLSYLETPWTKGKRSKRSRMEQQLQHSSCTEEEYLALCLIMLAHGGAGGVPAAKPAVSDNNSAPLPAAKLSYKCSVCNKAFSSYQALGGHKASHRKLGGEHHSTSSAVTTSSASNGGARTHECSICQKTFPTGQALGGHKRCHYEGGNSAVTASEGVGSTHTGSHRDFDLNLPAFPDFSTRFFVDDEVTSPHPSKKSRLNLTIPKIEIPQY

SEQ ID NO: 169 - protein, 303 aa, Glycine max
MSNISMVEAKLPPGFRFHPRDEELVCDYLMKKVAHNDSLLMINVDLNKCEPWDIPETACVGGKEWYFYTQRDRKYATGLRTNRATASGYWKATGKDRSILRKGTLVGMRKTLVFYQGRAPKGNKTEWVMHEFRIEGPHGPPKISSSKEDWVLCRVFYKNREVSAKPRMGSCYEDTGSSSLPALMDSYISFDQTQTHADEFEQVPCFSIFSQNQTSPIFNHMATMEPKLPANHATNAYGGAPNLGYCLDPLSCDRKMLKAVLNQITKMERNPLNQSLKGSPSLGEGSSESYLSEVGMPHMWNNY

SEQ ID NO: 170 - protein, 293 aa, Glycine max
MKIQCNVCEAAEAKVLCCADEAALCWECDEKVHAANKLASKHQRVPLSTSSSHMPKCDICQEALGYFFCLEDRALLCRKCDVAIHTANAYVSGHQRFLLTGVRVGLEAIDPGASLTSLKSDSGEKVSDTKSSSVSRKVSTVPQPSNYNEVLPIEVGGVGEFPPAKVSFGGGSTDGNISQWTIDEFIGLNEFSQHYDYMEGSSRADGGKLGDSDSPVLKSGEEDMEEEDDYLERVPDSSWTVPQIPSPPTASGLCWPKDPQYSSDSVLFVPDISFSLIQQSQISSICLRRWRQL

SEQ ID NO: 171 - protein, 333 aa, Glycine max
MTRRCSHCSHNGHNSRTCPNRGVKLFGVRLTDGSIRKSASMGNLTHYAGSGSGPLHTGLNNPGSPGETPDHAAAVADGYLSEDFVPGSSSSSRERKKGVPWTEEEHRMFLLGLQKLGKGDWRGIARTYVISRTPTQVASHAQKYFIRQSNVSRRKRRSSLFDIVADEAADTAMVQQDFLSANQLPTETEGNNPLPAPPPLDEECESMDSTNSNDGEPAPSKPENTQSSYPMLYPAYYSPVFPFPLPYWSGYSPESTKKEETHEVLKPTAVHSKSPINVDELVGISKLSLGESIGDSGPSSLSRKLIEEGPSRQSAFHATPTCGSSNGSAIHAV

SEQ ID NO: 172 - protein, 300 aa, Glycine max
MASELQLPPGFRFHPTDQELVLHYLCRKCASQPIAVPIIAEIDLYKYDPWDLPGLASYGEKEWYFFSPRDRKYPNGSRPNRAAGTGYWKATGADKPIGHPKPVGIKKALVFYAGKAPKGDKSNWIMHEYRLADVDRSVRKKNSLRLDDWVLCRIYNKKGTIEKFQPSSDVVVSRKMESSEIEDRKPEILKSGGGCLLPPVPPPQAKAAVKTDYMYFDPSDSIPKLHTDSSCSEHVVSPEFASEVQSEPKWKEWEKSLEFPFNYVDATLNNSNSFTTQFQGNNQMMSPLQDMFMYWPNKPF

SEQ ID NO: 173 - protein, 252 aa, Glycine max
MEGVPHPIPRTVEEVFTDFKGRRAGLIKALTTDVEKFYQQCDPEKENLCLYGFPNETWEVNLPVEEVPPELPEPALGINFARDGMQEKDWLSLVAVHSDSWLLAVAFYFGARFGFGKNERKRLFQMINDLPTIFELVTGSAKQSKDQPAAHNNGSKCKSSGKSHQSESQAKGMKMSAPPKEEDESGEEEEEDDEQGATCGACGDNYGTDEFWICCDMCERWFHGKCVKITPAKAEHIKQYKCPSCSNKRVRV

SEQ ID NO: 174 - protein, 241 aa, Glycine max
MGRGRVELKRIENKINRQVTFAKRRNGLLKKAYELSVLCDAEVALIIFSNRGKQYEFCSGSSMLKTLERYQKCNYGAPEDNVATKEALELSSQQEYLRLKARYEALQRSQRNLMGEDLGPLSSKELESLERQLDSSLKQIRSIRTQFMLDQLSDLQRKEHFLGESNRDLRQRLEEFQINPLQLNPSAEDMGYGRHPGQPQGHALFQPLECEPTLQIGYHPDPVSVVTEGPSMNNYMAGWLP

SEQ ID NO: 175 - protein, 442 aa, Glycine max
MEEETSDAMNLDLNLGPGPEPETGPMSNEAVNLDDWIGEPLQRISEAVRRARQRWRWRHLPLPHPEFHAHFPTEATRHFQIPPEARNISVELNHFLVNSGNGSALQAGEGSVAAEERMEEVPKACDNVNGVAEDETSQKKEDVEKGSGNDGDFFDCNICLDLARDPVVTCCGHLFCWPCLYRWLHLHSDAKECPVCKGEVTLKSVTPVYGRGNNVRGPEEDSALKIPPRPQAKRVESLRQTIQRNAFALPVEEMIRRLGSRIDLTRDLVQPPEPDAARETAERTTSLLSRFLTARGMRREHQNLVAPPEDVMGLAQNNVNTSEAGDPRSRVQSHLLRRTQSHRATLSTLSSALTSAERLVEAYFRSNPLGRNQEQPPPPVDDRDSFSSIGAVINSESQLDTAVEIDSMVSLSTSSSRRRNDASRVSDVDSGDSRAPRRRRLN

SEQ ID NO: 176 - protein, 283 aa, Glycine max
MANHPSEAPTDDFLEQILGLSTFASADPAADASPMMLQLNSGDAATHLAATHLAAFHAPPYQLGLSLDQGKGPFLTPEDASGSGKRFRDDVVDTRPKNFFHGQPMPTTVPTAPHPPAVRPRVRARRGQATDPHSIAERLRRERIAERIRALQELVPSVNKTDRAAMLDEIVDYVKFLRLQVKVLSMSRLGGAGAVAPLVTDIPLSSVEEEGGEGRNQPAWEKWSNDGTERQVAKLMEENVGAAMQFLQSKALCIMPVSLASAIYQSQPSGTSSIVKPETNPPS

SEQ ID NO: 177 - protein, 233 aa, Glycine max
MGRGKIEIKLIENPTNRQVTYSKRRNGIFKKAHELSVLCDAKVSLIMFSKNNKMHEYISPGLTTKRIIDQYQKTLGDIDLWRSHYEKMLENLKKLIDINNKLRRQIRHRIGEGLDMDDMSFQQLRTLEEDLVSSIGKIRERKFHVIKTRTDTCRKKVKSLEQMNRDLLFELEKCAIHPQFILHDEGDEESAVALANGASTLYAFCHQHHSHLNLPSHHSHGEEPFKTDDLRLA

SEQ ID NO: 178 - protein, 97 aa, Glycine max
MASSSISASGSWSVKDNKAFEKALAVYDKDTPDRWYNVAHAVGGKTPEEVKRHYELLVQDVKHIESGRVPFPNYKKTTSGSTDQEEKRLRNLNLNLQ

SEQ ID NO: 179 - protein, 316 aa, Glycine max
MMGYRNDTFAEDNAVREAASGLESVEKLIKLLSHTQQQYQTTSKSSMENIDTDYTAVADVAVSKFKKVISLLGRTRTGHARFRRAPVPVPVPVASPPPSEPRVYRATPLQQIPPPTLHTHSVTDHSLIPKIERKDSSKTINFSYSNSFVSSLTAGDTDTKQPCSSSPSPATAFQITNLSQVSSAGKPPLSSSSLKRKCSSENLGSAKCGSSSSRCHCSKKSRKMRQKRVVRVPAISLKMADIPPDDYSWRKYGQKPIKGSPHPRGYYKCSSVRGCPARKHVERALDDPSMLVVTYEGEHNHTLSAAEATNLILESS

SEQ ID NO: 180 - protein, 211 aa, Arabidopsis thaliana
MVRGKIEIKKIENVTSRQVTFSKRRSGLFKKAHELSVLCDAQVAAMIFSQKGRLYEFASSDIRNTIKRYAEYKREYFVAETHPIEQYVQGLKKEMVTMVKKIEVLEVHNRKMMGQSLDSCSVKELSEIATQIEKSLHMVRLRKAKLYEDELQKLKAKERELKDERVRLSLKKTIYTHLCQVGERPMGMPSGSKEKEDVETDLFIGFLKNRP

SEQ ID NO: 181 - protein, 373 aa, Arabidopsis thaliana
MFVSDNNNPSRDINMMIGDVTSNGDLQPHQIILGESSGGEDHEIIKAPKKRAETWAQDETRTLISLRREMDNLFNTSKSNKHLWEQISKKMREKGFDRSPSMCTDKWRNILKEFKKAKQHEDKATSGGSTKMSYYNEIEDIFRERKKKVAFYKSPATTTPSSAKVDSFMQFTDKGFEDTGISFTSVEANGRPTLNLETELDHDGLPLPIAADPITANGVPPWNWRDTPGNAGVDGQPFAGRIITVKFGDYTRRVGIDGTAEAIKEAIRSAFRLRTRRAFWLEDEEQVIRSLDRDMPLGNYILRIDEGIAVRVCHYDESDPLPVHQEEKIFYTEEDYRDFLARRGWTCLREFDAFQNIDNMDELQSGRLYRGMR

SEQ ID NO: 182 - protein, 287 aa, Arabidopsis thaliana
MDAAIPIWKRDDDKRFELALVRFPAEGSPDFLENIAQFLQKPLKEVYSYYQALVDDVTLIESGKYPLPKYPEDDYVSLPEATKSKTQGTGKKKGIPWSPEEHRLFLDGLNKYGKGDWKSISRECVTSRSPMQVASHAQKYFLRQKNKKGKRFSIHDMTLGDAENVTVPVSNLNSMGQQPHFDDQSPPDHYQDYFSQSNVTIPGCNMHFMGQQPRFGDQIPPGEYHPYSRDNVTVTGSNLNSIGQQPHFNDQISPDQYGRYLQENFGFFDDDGEDDGSLASFQQLYKA

SEQ ID NO: 183 - protein, 431 aa, Arabidopsis thaliana
MESNVMFSGFSPRMLSLEMPQNPPNPQNSIQFQHPHPYTTSGDQQTQPPIKSLYPYASKPKQMSPISGGGCDDEDRGSGSGSGCNPEDSAGTDGKRKLSQWHRMKWTDTMVRLLIMAVFYIGDEAGLNDPVDAKKKTGGGGGGGGGGGMLQKKGKWKSVSRAMVEKGFSVSPQQCEDKFNDLNKRYKRVNDILGKGIACRVVENQGLLESMDHLTPKLKDEVKKLLNSKHLFFREMCAYHNSCGHLGGHDQQPPQQNPISIPIPSQQQNCFHAAEAGKMARIAERVEVEEEVESDMAEDSESEMEESEEEETRKKRRISTAVKRLREEAASVVEDVGKSVWEKKEWIRRKMLEIEEKKIGYEWEGVEMEKQRVKWMRYRSKKEREMEKAKLDNQRRRLETERMILMLRRSEIELNELQSSGTRVDPSSAKG

SEQ ID NO: 184 - protein, 289 aa, Arabidopsis thaliana
MGNQKLKWTAEEEEALLAGVRKHGPGKWKNILRDPELAEQLSSRSNIDLKDKWRNLSVAPGIQGSKDKIRTPKIKAAAFHLAAAAAAAIVTPTHSGHSSPVATLPRSGSSDLSIDDSFNIVVDPKNAPRYDGMIFEALSNLTDANGSDVSAIFNFIEQQRQEVPPNFRRMLSSRLRRLAAQGKLEKVSHLKSTQNFYKMNDNSLVQRTPHVARPKESNTKSRQQTNSQGPSISQQIVEASITAAYKLVEVENKLDVSKGAAEEIERLMKLAEEADEMLVIAREMHEECK

SEQ ID NO: 185 - protein, 283 aa, Arabidopsis thaliana
MAKTKYGERHRKGLWSPEEDEKLRSFILSYGHSCWTTVPIKAGLQRNGKSCRLRWINYLRPGLKRDMISAEEEETILTFHSSLGNKWSQIAKFLPGRTDNEIKNYWHSHLKKKWLKSQSLQDAKSISPPSSSSSSLVACGKRNPETLISNHVFSFQRLLENKSSSPSQESNGNNSHQCSSAPEIPRLFFSEWLSSSYPHTDYSSEFTDSKHSQAPNVEETLSAYEEMGDVDQFHYNEMMINNSNWTLNDIVFGSKCKKQEHHIYREASDCNSSAEFFSPSTTT

SEQ ID NO: 186 - protein, 302 aa, Arabidopsis thaliana
MSSSGTIWSYEEEKAFENAIAMHWIEESSKEQWEKIASAVPSKSMEDVKQHYQVLVEDVSAIEAGHISFPNYAASEEITSSNKDFHGSSKATSSDKRSNCNYGRGFSGLGHDSTTHSSGKGGLSRSSEQERRKGIPWTEEEHRLFLLGLEKFGKGDWRSISRNFVISRTPTQVASHAQKYFIRLNSMNRDRRRSSIHDITSVNNGDVANNQAPITGQHSSTIPSNTMGVGQSLKHRVQGHIPPGLGMYGTPVGHPVAAPPGHMASAVGTPVMLPPGPHPHAHPHPPYVLPLAYPMAPPTMHQ

SEQ ID NO: 187 - protein, 368 aa, Arabidopsis thaliana
MMSSSSPTQLASLRDMGIYEPFQQIVGWGNVFKSDINDHSPNTATSSIIQVDPRIDDHNNNIKINYDSSHNQIEAEQPSSNDNQDDDGRIHDKMKRRLAQNREAARKSRLRKKAYVQQLEESRLKLSQLEQELEKVKQQGHLGPSGSINTGIASFEMEYSHWLQEQSRRVSELRTALQSHISDIELKMLVESCLNHYANLFQMKSDAAKADVFYLISGMWRTSTERFFQWIGGFRPSELLNVVMPYLQPLTDQQILEVRNLQQSSQQAEDALSQGIDKLQQSLAESIVIDAVIESTHYPTHMAAAIENLQALEGFVNQADHLRQQTLQQMAKILTTRQSARGLLALGEYLHRLRALSSLWAARPQEPT

SEQ ID NO: 188 - protein, 299 aa, Arabidopsis thaliana
MGRTPCCDKIGLKKGPWTPEEDEVLVAHIKKNGHGSWRTLPKLAGLLRCGKSCRLRWTNYLRPDIKRGPFTADEEKLVIQLHAILGNRWAAIAAQLPGRTDNEIKNLWNTHLKKRLLSMGLDPRTHEPLPSYGLAKQAPSSPTTRHMAQWESARVEAEARLSRESMLFSPSFYSGVVKTECDHFLRIWNSEIGEAFRNLAPLDESTITSQSPCSRATSTSSALLKSSTNSWGGKEVTVAIHGSDYSPYSNDLEDDSTDSALQLLLDFPISDDDMSFLEENIDSYSQAPPIGLVSMVSKF

SEQ ID NO: 189 - protein, 222 aa, Arabidopsis thaliana
MGRGKIEIKRIENTTNRQVTFCKRRNGLLKKAYELSVLCDAEVALIVFSSRGRLYEYSNNNIRSTIERYKKACSDHSSASTTTEINAQYYQQESAKLRQQIQMLQNSNRHLMGDALSTLTVKELKQLENRLERGITRIRSKKHEMLLAEIEYFQKREIELENENLCLRTKITDVERIQQVNMVSGPELNAIQALASRSFFNPNMLEGGTVYPHSDKKILHLG

SEQ ID NO: 190 - protein, 242 aa, Glycine max
MEFPNEAIPEGCSQKKTGRGKIGIKRIENTTNRQVTFCKRRNGLLKKAYELSVLCDAEVALVVFSSRGRLYEYANNSVRGTIDRYKKACAASTNPESVSEANTQFYQQEASKLKRQIRDIQNLNRHILGEALSSLSLKELKNLESRLEKGLSRVRSRKHETLFADIEFMQKREIELQNHNNFLRAKIAEHEKAQQRQQDMIPGNVCESTIPPQSYDRNFFPVNLIDSNNQYSNQDQTALQLV

SEQ ID NO: 191 - protein, 268 aa, Glycine max
MDKSEQTQQQHQHGMGVATGASQMAYSSHYPTAPMVASGTPAVAVPSPTQAPAAFSSSAHQLAYQQAQHFHHQQQQHQQQQLQMFWSNQMQEIEQTIDFKNHSLPLARIKKIMKADEDVRMISAEAPVIFAKACEMFILELTLRSWIHTEENKRRTLQKNDIAAAISRNDVFDFLVDIIPRDELKEEGLGITKATIPLVNSPADMPYYYVPPQHPVVGPPGMIMGKPVGAEQATLYSTQQPRPPMAFMPWPHTQPQQQQPPQHQQTDS

SEQ ID NO: 192 - protein, 192 aa, Glycine max
MESTVTFETDLNLKATELRLGLPGTEEIVEKPLPASARITNKRPLSETSEECASKGSSAPHVETEAAPPAKAKIVGWPPIRSYRKNSLQENDGAGIYVKVSMDGAPYLRKIDLKVYGGYTQLLKALENMFKLTIGEYSEKEGYKGSDYAPTYEDKDGDWMLVGDVPWDMFVTSCKRLRIMKGSEARGLGCAV

SEQ ID NO: 193 - protein, 233 aa, Glycine max
MFQESSVTRWPTQWTRYHDKLFERALLVVPEDLPDRWEKIADQVPGKSAVEVREHYEALVHDVFEIDSGRVEVPSYVDDSVAMPPSGGAGISTWDNANQISFGSKLKQQGENERKKGTPWTEEEHRLFLIGLSKFGKGDWRSISRNVVVTRTPTQVASHAQKYFLRQNSVKKERKRSSIHDITTVDSNSAPMPIDQTWVPPPGGSLQQSQQYPSSNMHDQMGTFGYSNYGFDM

SEQ ID NO: 194 - protein, 179 aa, Glycine max
MASFGGTTQKCMACAKTVYLVDKLTADSRVYHKACFRCHHCRNTLKLSNYCSFEGVLYCRPHYDQLYKRTGSLDKSFEGIPKIQKPEKPVTGNENTKVLANVFLGTRDKCVCCNKTVYPTERVTVNGTPYHKGCFKCTYGGCTVSSSNFITHEGKPYCKHHHIQLFKEKGNYSQLENEC

SEQ ID NO: 195 - protein, 432 aa, Arabidopsis thaliana
MSSSDRDIIDIESGEEDLYSDGGNDIIDIESGEEDLYSDGGNVSDDYNPVDDTISRSEKSYVVVKEEDILKLQRDDIEQVSTVLSVSQVESIVLLLHYHWCVSKLEDEWFTDEERIRKTVGILKEPVVDVNGTEVDIQCGICFESYTRKEIARVSCGHPYCKTCWTGYITTKIEDGPGCLRVKCPEPSCYAVVGQDMIDEVTEKKDKDKYYRYFLRSYVEDGKKMKWCPSPGCEYAVEFGVNGSSSYDVSCLCSYKFCWNCCEDAHSPVDCETVSKWLLKNKDESENMNWILAKTKPCPKCKRPIEKNTGCNHMSCSAPCRHYFCWACLQPLSDHKACNAFKADNEDETKRKRAKDAIDRYTHFYERWAFNQSSRLKAMSDLEKWQSVELKQLSDIQSTPETQLSFTVDAWLQVSKSNIYKTIENVCGNDGT

SEQ ID NO: 196 - protein, 902 aa, Arabidopsis thaliana
MASEASPSSSATRSEPPKDSPAEERGPASKEVSEVIESLKKKLAADRCISIKKRIDENKKNLFAITQSFMRSSMERGGSCKDGSDLLVKRQRDSPGMKSGIDESNNNRYVEDGPASSGMVQGSSVPVKISLRPIKMPDIKRLSPYTTWVFLDRNQRMTEDQSVVGRRRIYYDQTGGEALICSDSEEEAIDDEEEKRDFLEPEDYIIRMTLEQLGLSDSVLAELASFLSRSTSEIKARHGVLMKEKEVSESGDNQAESSLLNKDMEGALDSFDNLFCRRCLVFDCRLHGCSQDLIFPAEKPAPWCPPVDENLTCGANCYKTLLKSGRFPGYGTIEGKTGTSSDGAGTKTTPTKFSSKLNGRKPKTFPSESASSNEKCALETSDSENGLQQDTNSDKVSSSPKVKGSGRRVGRKRNKNRVAERVPRKTQKRQKKTEASDSDSIASGSCSPSDAKHKDNEDATSSSQKHVKSGNSGKSRKNGTPAEVSNNSVKDDVPVCQSNEVASELDAPGSDESLRKEEFMGETVSRGRLATNKLWRPLEKSLFDKGVEIFGMNSCLIARNLLSGFKSCWEVFQYMTCSENKASFFGGDGLNPDGSSKFDINGNMVNNQVRRRSRFLRRRGKVRRLKYTWKSAAYHSIRKRITEKKDQPCRQFNPCNCKIACGKECPCLLNGTCCEKYCGCPKSCKNRFRGCHCAKSQCRSRQCPCFAADRECDPDVCRNCWVIGGDGSLGVPSQRGDNYECRNMKLLLKQQQRVLLGISDVSGWGAFLKNSVSKHEYLGEYTGELISHKEADKRGKIYDRENCSFLFNLNDQFVLDAYRKGDKLKFANHSPEPNCYAKVIMVAGDHRVGIFAKERILAGEELFYDYRYEPDRAPAWAKKPEAPGSKKDENVTPSVGRPKKLA

SEQ ID NO: 197 - protein, 330 aa, Glycine max
MNQKFIGKPPATVDLDRMPERGSHHRRSHSDTSFRFAANFDDLLLFDPSDFDISGLPSPLPLPSPVSAGLVPMSVDSDESGKQPRPAGASAGGHLRSLSVDSDFFDGLGFGGDERGAGKGGGGERRVGHHRHSNSMDGSSTTSFEADSAMIMDGVKKAMAPDKLAELALMDPKRAKRILANRQSAARSKERKIRYTSELERKVQTLQTEATNLSAQLTMLQRDTTDLTTENKELKLRLEALEQEAQLREDLNEALKEELQRLRAQSTRLGAIGGNPSFGGIFNQLASQLAMQQLSNSAPHQQTQHQPQVGMPPPPSGQNHPNFMDFNQQK

SEQ ID NO: 198 - protein, 358 aa, Arabidopsis thaliana
MEGSSSTIARKTWELENSILTVDSPDSTSDNIFYYDDTSQTRFQQEKPWENDPHYFKRVKISALALLKMVVHARSGGTIEIMGLMQGKTDGDTIIVMDAFALPVEGTETRVNAQDDAYEYMVEYSQTNKLAGRLENVVGWYHSHPGYGCWLSGIDVSTQRLNQQHQEPFLAVVIDPTRTVSAGKVEIGAFRTYSKGYKPPDEPVSEYQTIPLNKIEDFGVHCKQYYSLDVTYFKSSLDSHLLDLLWNKYWVNTLSSSPLLGNGDYVAGQISDLAEKLEQAESHLVQSRFGGVVPSSLHKKKEDESQLTKITRDSAKITVEQVHGLMSQVIKDELFNSMRQSNNKSPTDSSDPDPMITY

SEQ ID NO: 199 - protein, 434 aa, Saccharomyces cerevisiae
MSNKFHCDVCSADCTNRVRVSCAICPEYDLCVPCFSQGSYTGKHRPYHDYRIIETNSYPILCPDWGADEELQLIKGAQTLGLGNWQDIADHIGSRGKEEVKEHYLKYYLESKYYPIPDITQNIHVPQDEFLEQRRHRIESFRERPLEPPRKPMASVPSCHEVQGFMPGRLEFETEFENEAEGPVKDMVFEPDDQPLDIELKFAILDIYNSRLTTRAEKKRLLFENHLMDYRKLQAIDKKRSKEAKELYNRIKPFARVMTAQDFEEFSKDILEELHCRARIQQLQEWRSNGLTTLEAGLKYERDKQARISSFEKFGASTAASLSEGNSRYRSNSAHRSNAEYSQNYSENGGRKKNMTISDIQHAPDYALLSNDEQQLCIQLKILPKPYLVLKEVMFRELLKTGGNLSKSACRELLNIDPIKANRIYDFFQSQNWM

SEQ ID NO: 200 - protein, 262 aa, Arabidopsis thaliana
MGSIRGNIEEPISQSLTRQNSLYSLKLHEVQTHLGSSGKPLGSMNLDELLKTVLPPAEEGLVRQGSLTLPRDLSKKTVDEVWRDIQQDKNGNGTSTTTTHKQPTLGEITLEDLLLRAGVVTETVVPQENVVNIASNGQWVEYHHQPQQQQGFMTYPVCEMQDMVMMGGLSDTPQAPGRKRVAGEIVEKTVERRQKRMIKNRESAARSRARKQAYTHELEIKVSRLEEENEKLRRLKEVEKILPSEPPPDPKWKLRRTNSASL

SEQ ID NO: 201 - protein, 385 aa, Glycine max
  misc_feature (347)..(347): Xaa can be any naturally occurring amino acid
MTSLSTHHTYSRKQKSLGLLCTNFLSLYNKEGVRLVGLDDAASRLGVERRRIYDIVNVLESVGVLTRKAKNQYTWKGFCAIPAALQELKDEGLKENPGSFDDSNDNAKVSDDEEEEEETFPNINIGSQSEKENPDYTATVKSSKNENRREKSLALLTQNFVKLFVCSNFEMISLDEAAKLLLGNANNRTKVRRLYDIANVLSSMNLIEKTHTTNTRKPAFRWLGVRGKTWGGSVDLAQNSNVKESRKRMFGTDIGNISFKRNKVDLSMDGQNSKMQNQHENISPRAQLEKIIIKKDAKQTSESYQFGPFAPAYVPKVGTSENNSVKKVHDWDSLAQEHRPQYQNQGXALKDLFSHYMEAWKSCSRPSFLVQSGDKLELCRAFVRI

SEQ ID NO: 202 - protein, 271 aa, Glycine max
MGAPKQKWTAEEEQALKAGVVKHGVGKWRTILKDPEFSSVLYLRSNVDLKDKWRNLSVMANGWSSREKSRLSVRRVHQVPRQDENSMAITAVAPSDEEIVDVKPLQVSRDMVHIPGPKRSNLSLDKLIMEAITCLKENGGSNKTAIAAFIEVNRKYRIAPIAAYSDRRRNSSVLYLEGRQKASMKIDRDETNILTRSQIDLELEKIRSMTPQEAAAFAARAVAEAEAAIAEAEEAAKEAEAAEADAEAAQAFADATTKSAKGRKSPKRIHA

SEQ ID NO: 203 - protein, 150 aa, Zea mays
MATPARIELDKLSVEQLKGLKEQTDLEVNLLQDSLTKIRTAATRLENASAALQDLSLRPQGKKMLVPLTASLYVPGSLDDAEKVLVDVGTGYFIEKTMAQGKEYCERKINLLKSNFDELVEVATKKKAIADDMGLLLQAKLRQASPGPSS

SEQ ID NO: 204 - protein, 304 aa, Glycine max
MNVKVHSSDDTKKDEEVVLPGFRFHPTDEELVGFYLQRKVDKKPLKIELIKQVDIYKYDPWDLPKVNSFGDKEWYFFCIRGRKYRNSVRPNRVTRSGFWKATGIDKSIYCVKEPHECIGLKKSLVYYRGSAGKGTKTDWMMHEFRLPPNAKSSPNDVQEAEVWTLCRIFKRIPSFKKYAPNLKDSTPATKPNPVNSNASTLDSDNCCKPYLICRDPMMMQQIERKPVIGQVDEKKHLFLGQFGPLSHLQAPSTTPYPNFWNQNNVEDHAFANENWDDLRSVVQFAIDPSTVFDCTETYIPPYFS

SEQ ID NO: 205 - protein, 300 aa, Gossypium hirsutum
MVGKEDLGLSLSLGFPQNRHSLQLNLRPSLIPSSVDSCSSVPSGFTAIHKSLWNDVSAPSDPNAESFRGETRSFLRGIDVNRLPSTVDCEEAAGVSSPNSTISSVSGKRSEREGTNGDELDIERACSRGISDEEDGDASRKKLRLSKDQSAILEESFKENNTLNPKQKMALAKQLGLRPRQVEVWFQNRRARTKLKQTEVDCEFLKRCCENLTEENRRLQKEVQELRALKLSPQFYMQMTPPTTLTMCPSCERVGASSTVDPRSHHQLPQNHHRAIPINPWAPAAAPIPHGPLDALRLRS

SEQ ID NO: 206 - protein, 124 aa, Zea mays
MGGKCPHRKVKKRRLSHKTARRGKFLLKADDAVYDELVKLADQGKDAEGKELPVDEDLPGMGQFYCLHCDRYFASESVKDDHYRSKRHKKRVKVMSGPAPHTQLDAELAAGMGKPDNGLKLMSM

SEQ ID NO: 207 - protein, 307 aa, Glycine max
MKWESITLSSPTSCTPNSNTNWLVENNSRSTKWTPEENKLFENALAVHDKDTPDRWHKVAEMIPGKTVVDVIRQYKELEVDVSNIEAGLIPVPGYSSTAISPFTLDWVNTPGYDGFKGCGKRPSSVRPIEHERKKGVPWTEEEHKLFLLGLKKYGKGDWRNISRNFVITRTPTQVASHAQKYFIRQLSGGKDKRRASIHDITTVNLTETITTSCSEDTNRSTSPHVLSQPQQQNSTPTTPRTHFQWTNQSNTGVAMTLNPAHERVFMSPYGANSFGVKIEGQNLHESSYLGPQTQNMVFQMQQSSQH

SEQ ID NO: 208 - protein, 205 aa, Glycine max
MAKEKKNLSNKNKKPSNADEVHFRGVRKRPWGRYAAEIRDPGKKTRVWLGTFDTAEDAARAYDVAARNFRGPKAKTNFPFLPDNNTNVNLNKKNNNVNVKSDSPSQSSTVESSTPEREFTRRAAPAAMDRFPFLPIQQQILVTHPVAPMRPVYFLDRAHFMTQPFPLRFEPGPVQSDSDSSSVVVDCQPKRELNLDLNLAPPNEY

SEQ ID NO: 209 - protein, 283 aa, Glycine max
MDMELLDLPLDFEDVETDAVEEQDWDAQLKLLEDPPPPLGVFPLQQSSAFCGQTRNENAKLGSKSFSASLAKTVRPAYGKTIPVQKVSLKGKDLLQFQTNSPVSVFESSSSSPSVENSNFELPVIPTKRPRTKRRRLSNISLLYSIPFILTSPAFQKFQRMDFSKSDIQTQPSGELLCKFKKKQRKKDIPLPTNKIEMKRSSSQESVAPRKCLHCEVTKTPQWREGPMGPKTLCNACGVRYRSGRLFAEYRPASSPTFVASLHSNSHKKVLEIRNRATQVTVR

SEQ ID NO: 210 - protein, 205 aa, Glycine max
MSSRAGKGPAVRSYRRRKTALDLDLNRVPAGENREQEGPSTQSVPREVQVEQQQQATQPPMIDVEAIDDDVVECTPRAFAEAKNNSRRVRRRTIVDVDLEDQTRRNKRRRELPNLIINCDKYINLEGGSSSMEQSFKKPPEPPKELVFNCPICMGPMVHEMSTRCGHIFCKDCIKAAISAQGKCPTCRKKVVAKDLIRVYLPSTS

SEQ ID NO: 211 - protein, 244 aa, Glycine max
MGRGRVQLKRIENKINRQVTFSKRRSGLLKKAHEISVHCDAEVALIVFSTKGKLFEYSSDPCMEKILERYERYSYAERQLVASDQPLTENWTLEHAKLKARLEVLQKNQRNFMGQDLEGLSIKELQNLEHQLESALKHIRSRKNQLMYESISELHKKDKALQEQNNTLAKKIKEKEKALAQQAQLERLGDEVDLTSSALVPQPLVTSNIRTSSQIRGEGDNEGTPTPTQANAILPPWMLRPTNE

SEQ ID NO: 212 - protein, 284 aa, Glycine max
MDELEETLLTQIDWESFLDDIPELNVDDFLQDDNAVPVVTDNHSSPNDDPVLSEIENMLMTQAENDAVVLPETPSSEAGYYKLFEEILVEEPKEGPVSPPSKIESEEGSDKDKTDDAASDEPMSKKLKRQLRNRDAAVRSRERKKLYVKNLEMKSRYLEGECRRLGHLLQCCYAENNALRLCLQLRGIYGASMTMQESAVLLLEPLLLGSLLWCMGIICHLSLPLMLWVAAVLPRENIEQKGLRRVTQKGSESKISECFQMQSFLKSRKSRASRTKMKFNFIVF

SEQ ID NO: 213 - protein, 234 aa, Glycine max
MEGHHLHHRQQQLQQHHHPHHNITTSNVDATDRFPQWSIQETKEFLVIRAELDQTFMETKRNKQLWEVISNRMKEKGFHRSAEQCKCKWKNLVTRYKGCETMEPEAMRQQFPFYNELQAIFAARMQRMLWAEAEGGSNNKKKGMHLSSDDEEEGNEEMMSEGDHKGNIIISKKNKKKGKMVIGVGGSGNNNNNSSSSSNNLEREEQRRIREEVRADKRDALITALLNKLRREEM

SEQ ID NO: 214 - protein, 368 aa, Glycine max
MINSTKEADFPLKQEGLSSGDHEKAKAPSTSSSSSQWLKLKDPRIVRVSRAFGGKDRHSKVCTIRGLRDRRVRLSVPTAIHLYDLQDRLGLNQPSKVVDWLLNAAKHEIDELPPLPIPPGNFTLGYPSLVSCNEVSTSREGSGQNTLLWKPKSGEMVSDDKANWMNRSEGDDDNNHNNSNGKEGSNNNICHGGTLVLPNNLLPRPNHPSFLSLMNIMPSLGYQWEANNSAHDVNIGQWQNHGFLNQTDVHSINVVPFPSTLALSTGSDTTTTSQILVCPPHGATTQPYFPSSHHVAAMEMNARQINHYQMLSSSSHQNLLANSLNPSSQQLMSQSEKLPFSLGIRPKLFHSPNRSESHSQKDQDLPSK

SEQ ID NO: 215 - protein, 232 aa, Glycine max
MAFQHYISRDLKTIPNAATETENSNGCFDCNICLDFAHEPVVTLCGHLYCWPCIYKWLHVQSDSLAPDEHPQCPVCKADISNSTMVPLYGRGHAATAEGKTSSCDVFIPPRPSASCVQALLATSSQRGQHLPYRNPYQGHYFSSHPYQEEDDATSQMLNLGSHHHPVTGMFGEMVYARVFGNPENLYAYPNSYQLMGSATPRLRRQEMQAHKSLNRISIFLFCCFLLCLVVF

SEQ ID NO: 216 - protein, 680 aa, Glycine max
MCSDSKSKLSSPTLVVMENSNIQKQNLDGLYNSVLLELSASDDYEAFKREVEEKGLDVNEAGFWYGRRIGSKKMGSETRTPLMIASLFGSAKVLNYILLQKGGGVDVNRVCGSDRATALHCAVAGGSESSLEIVKLLLDAGADAECLDASGNKPVNLIAPAFDSLSKSRRKALEMFLRGGGERDELMSQEMELQMFSVPEKKEGSDNKKEYPVDISLPDINNGVYGTDEFRMYNFKVKPCSRAYSHDWTECPFVHPGENARRRDPRKYPYSCVPCPEFRKGTCQKGDSCEYAHGVFESWLHPAQYRTRLCKDETGCARKVCFFAHKPEELPPVYASTGSAMPSPKSYSASGLDMTAMSPLALSSTSLPMPTVSTPPMSPLAAASSPKSGSMWQNKINLTPPSLQLPGSRLKAALSARDLEMEMELLGLESPARQQQQQQQQLIEEIARISSPSFRSKEFNRIVDLNPTNLDDLLASADPSVFSQLHGLSVQPSTPTQSGLQMRQNMNHLRASYPSNIPSSPVRKPSAFGFDSSAAVATAVMNSRSAAFAKRSQSFIDRGAATHHLGLSSASNSSCRVSSTLSDWSSPTGKLDWGVNGDKLNKLRKSTSFGFRNSGVTASPIAQPEFGAEPDVSWVHSLVKDVPSERSEIFGAEKQQYDLSKEMLPPWMEQLYIEQEQMVA

SEQ ID NO: 217 - protein, 429 aa, Glycine max
MGRHSCCYKQKLRKGLWSPEEDEKLLNHITKHGHGCWSSVPKLAGLQRCGKSCRLRWINYLRPDLKRGAFSQQEENMIVELHAVLGNRWSQIAAQLPGRTDNEIKNLWNSCLKKKLRQRGIDPTTHKPLSEVENDKDMNMMPPSTDKSTQKASVGSNEVVSNLVDHHQPPKTMPNSSSERYPLEVSTTSSTQELFLDRFGTTTTTCHENNNNTSDLVGSYFSFQHLNYGTTTSMALSSNPNTSLCFILPSTSSDINNNNSIITSSSMLPSIFPTQHVKLQSNNNNPSSISSDGVQNWETSNNTNKNNGNMQLQSSTNYLDSTWGVAESMKIVNINKEAQVVPLQAEQEDLKWSEYLNTPFILGNNTTQNHQIQTSQSIYTEVIKPETGFIIDESCTSNWHHHQPPPAFQLSDIYSKDLQRFSVTFGQTL

SEQ ID NO: 218 - protein, 246 aa, Glycine max
MSNSDATTNGVSNGAIIDAQRQQALAVKKPPSKDRHSKVDGRGRRIRMPIICAARVFQLTRELGHKSDGQTIEWLLRQAEPSIIAATGSGTTPASFSSVSLSVRAAANSLSSPSSTSDHKPQLLSPTPFILGKRIRTDEDSSKDEAVSVGPSLVGPSTPPGLWALPARPDFGQIWSFAAAAAPEMVSVSQQQQASLFAHHHRQQQQQAIGEASAARVGNYLPGHLNLLASLSGGPGNSGRRDDEPR

SEQ ID NO: 219 - protein, 209 aa, Glycine max
MTTAEETSNLDLIRQHLLGENIISDSSFFSNLLHHPMKLEAPSSPEFDFTSYISDNTSFFTFLEGYDLMADMKFVDSDNTIPSKEVKKCNISPEPLVSSKEKPKKLEYDKAKRYRGVRRRPWGKFAAEIRDPTRKGTRVWLGTFDSEIDAAKAYDCAAFKMRGQKAILNFPLEAGLSDPKPNSCGRKRRRESHDHELELPQVQVHHGVS

SEQ ID NO: 220 - protein, 421 aa, Glycine max
MENNAFRDQIMEDNEHEEMPDSFVCCVCLDLLYKPIVLSCGHMCCFWCVYNSMSCLRESQCPVCRNQYYHFPTVCQLLHFLLLKIYTAAYKRRESQTLEEEKKSGFYSPQFDPDTCESQAKFGHSGIPSSSSILNLTSNSCNVGTSECLEQSGSTANEGDEGTIFSNREPDIIGTPAKGKKLPQEELSLQQKLSVADVTCTMCKQLLFHPVVLNCGHVYCQICVINIDDEMLRCKVCQSPHPRGLPKVCLELDHFLEEQFPEEYGQRRDAIELQQIKVKPDTPSSCSLDGGKKPENTDWWSDPDSKVHIGVGCDFCGMFPIIGDRYRCIDCKEKMGFDLCGDCYASRSKLPGRFNQQHTSEHKFKLVQPNIIHNIMLRLATAQLGEGSIDLESIGNIEVTSDGAALFGDGEDNHNDSEAAN

SEQ ID NO: 221 - protein, 451 aa, Glycine max
MLDNNNCSASNSGAPSSSDAAFALSENGVANNKRKRRPAGTPDPDAEVVSLSPTTLLESDRYVCEICNQGFQRDQNLQMHRRRHKVPWKLLKRETAQGGHQKKRVFVCPEPTCLHHDPCHALGDLVGIKKHFRRKHSNHKQWVCDKCSKGYAVQSDYKAHIKTCGTRGHSCDCGRVFSRVESFIEHQDACTVRQHRPELQALQPACSSRTASSASPSSEANFSIAPPLQGLPVLPKPAEQQQQPATTTVLLTSEIHGNKSTTSHNLELQLLPSSTNSQAKRNTKENYGLKLSIGSCSNDKGNSSEPPERACSEAHRSPPERNNNNNNNNVSDYSTLEVARLQEFAGEELKLAIAEKAYAEEARREAKRQIEIAELEFENAKRIRKQAQAELSRAEELRKQAIKKIGSTVMEIACHTCKQQFQSSTVGVPSSEETSIVMSYMSSATTEGEAE

SEQ ID NO: 222 - protein, 222 aa, Glycine max
MRKGRGGGASAAAVDVNGSILKEPRYRGVRKRPWGRFAAEIRDPLKKARVWLGTFNSAEDAARAYDAAARTLRGPKAKTNFPPLSPFCYPHPTTDPFFYTGFHDQHHHHNNNNLNNPQRPTSSGMSSTVESFSGPRPPTTTTTTTTTTATPFLTATRRYPRTPPLVPEDCHSDCDSSSSVVDDGDDNIVSSSFRPPLPFDLNALPFDDAAADDDLRRTALCL

SEQ ID NO: 223 - protein, 203 aa, Glycine max
MARGKVQLKRIENPVHRQVTFCKRRAGLLKKAKELSVLCDAEIGLFIFSAHGKLYELATKGTMQGLIERYMKFTRGAQPEAAAPEAHPLLVAKEETNALKQEIQTLQKGISYLFEGGNKTMAIDELQLLEKNLETWIYHIRSMKMNIMLQEIQALKDKEGTLKAANKYLHDKIVENTAISNFAEFATDTSYPLIVQDGGFQLY

SEQ ID NO: 224 - protein, 226 aa, Arabidopsis thaliana
MQMDSAQNQFNKRARLFEDPELKDAKVIYPSNPESTEPVNKGYGGSTAIQSFFKESKAEETPKVLKKRGRKKKNPNPEEVNSSTPGGDDSENRSKFYESASARKRTVTAEERERAVNAAKTFEPTNPYFRVVLRPSYLYRGCIMYLPSGFAEKYLSGISGFIKLQLGEKQWPVRCLYKAGRAKFSQGWYEFTLENNIGEGDVCVFELLRTRDFVLEVTAFRVNEYV

SEQ ID NO: 225 - protein, 155 aa, Arabidopsis thaliana
MEEIQQQTQKEEQKHREEEEEEEEGPPPGWESAVLPPPIVTITAAVNPNPTTVEIPEKAQMVCGSCRRLLSYLRGSKHVKCSSCQTVNLVLEANQVGQVNCNNCKLLLMYPYGAPAVRCSSCNSVTDISENNKRPPWSEQQGPLKSLSSLRRAEN

SEQ ID NO: 226 - protein, 158 aa, Arabidopsis thaliana
MERQIINRKKRVFSLEPNKNPSAVFTRKYTSHLVPALKKLNMNKNSSKQTVKHEVDMALALSAQEFAWSRFLLQKLSSSSNPTTTTSSSSDGIRILERPDKEGGNEEGGIEERLRELKKLLPGGEEMNVEEMLSEIGNYIKCLELQTIALKSIVQDST

SEQ ID NO: 227 - protein, 247 aa, Arabidopsis thaliana
MDNFFLGLSCQEENNFWDLIVADISGDRSVSVPIRSAFRSYMKDTELRMMSPKISSSKVNVKKRMVNLLRKNWEEKKNTVAPEKERSRRHMLKERTRREKQKQSYLALHSLLPFATKNDKNSIVEKAVDEIAKLQRLKKELVRRIKVIEEKSAKDGHDEMSETKVRVNLKEPLSGLDSMLEALHYLKSMGTKLKTVHANFSPQEFSATMTIETQIRGEEVEKRVERRLQETEWKLLFLPEASFYKDY

SEQ ID NO: 228 - protein, 283 aa, Arabidopsis thaliana
MGSSSKNIEQAQDSYLEWMSLQSQRIPELKQLLAQRRSHGDEDNDNKLRKLTGKIIGDFKNYAAKRADLAHRCSSNYYAPTWNSPLENALIWMGGCRPSSFFRLVYALCGSQTEIRVTQFLRNIDGYESSGKGLDVFGGGGGASLSDLSAEQLAKINVLHVKIIDEEEKMTKKVSSLQEDAADIPIATVAYEMENVGEPNVVVDQALDKQEEAMARLLVEADNLRVDTLAKILGILSPVQGADFLLAGKKLHLSMHEWGTMRDRRRRDCMVDTEGNAGGEEGK

SEQ ID NO: 229 - protein, 222 aa, Solanum lycopersicum
MAPKEKIGAVTAMAMVNLNGISKEVHYRGVRKRPWGRYAAEIRDPGKKSRVWLGTFDTAEEAARAYDNAAREFRGAKAKTNFPKLEMEKEEDLKFAVKNEINRSPGQTSTVESSSPVMVDSSSPLDLSLCGSIGGFNHHTVKFPSSGGGFTGSVQAVNRMYYIEALARAGVIKLEQIGRKRLDYLGGGDSDSSTVIDFMRVDVKSTTAGLNLDLNFPPPENM

SEQ ID NO: 230 - protein, 208 aa, Eucalyptus grandis
MGRGKIEIKRIENSNNRQVTYSKRRNGLIKKAKEISVLCDAQVSVIIFGSSGKMHEYCSSNTSLVDILDQYHTQCGKRLWDAKQENLSNELDRIKKENDNLQIQLRHLKGEDITSLNHRELIILEDTLENGVGCVRDQKDEVLMTHRRNQKQLEEDAKELHFYAQQKDMMMAETGRAGNDGYHQRMKADFGPSTYHVQPIQPNLQRRF

SEQ ID NO: 231 - protein, 229 aa, Brassica napus
MEEGDFFSCFSEINSGMTMNKKKMRKGTNHKRFSEEQIKPLEVIFESETRLEPRKKVQLARELGLQPRQVAIWFQNKRARWKSKQLEKEYDILRANYNNLASQFEIIKKEKQALVSELQRLNEEMQKTKEERNEKACRGEQRVALSSSTWSDNGKYEPEVRLNQGIVLCNDDIKTEYFGFEEESNHELIYIVEQADDSGLTSSDNWGNFNSESLLDQSSSNYPWWDFWS

SEQ ID NO: 232 - protein, 201 aa, Solanum lycopersicum
MTKQDEGLTLELIRQHLLEDFTTTESFIDSLNSCFSDHISSSDDISPVFTSVKTEPSTSNSLSDSPNSSYPNEPNSPISRYFNLRSDFPEFKIDSDTILSPVFDSSAGSNEDNNKKKNYRGVRRRPWGKFAAEIRDPSRKGSRIWLGTFDTDIDAARAYDCAAFKMRGRKAILNFPLDAGKSGAPANVGRKRRRENKMELV

SEQ ID NO: 233 - protein, 245 aa, Eucalyptus grandis
  misc_feature (151)..(151): Xaa can be any naturally occurring amino acid
MGRGKVELKRIENKINRQVTFAKRRNGLLKKAYELSVLCDAEVALIIFSNRGKLYEFCSSSSMMKTIEKYQKCSYGSLETNCSINEMQNSYQDYLKLKARVEVLQRSQRNPPWEELGPLNSKELEQLEHQLENSLKQIRSAKTQFMFDQLXHLQHKEQMLVEANRELWKKLEESNTRIPLRLGWEAEDHNNISYSRLPTQSQGLIFQPLGGNPTLQIGYNPAGSNELNVSAADQHPNGFIPGWML

SEQ ID NO: 234 - protein, 525 aa, Triticum aestivum
  misc_feature (389)..(389): Xaa can be any naturally occurring amino acid
  misc_feature (416)..(416): Xaa can be any naturally occurring amino acid
SASTRPPLPPAPQLNASTSSTVTGGGYFDLPPSVDSSCSTYALRPIPSPAVAPADLSADSVVRDPKRMRTGGSSTSSSSSSSSLGGGGARSSVVEAAPPVAAAAGAPALPVVVVDTQEAGIRLVHALLACAEAVQQENFSAAEALVKQIPLLAASQGGAMRKVAAYFGEALARRVFRFRPQPDSSLLDAAFADLLHAHFYESCPYLKFAHFTANQAILEAFAGCRRVHVVDFGIKQGMQWPALLQALALRPGGPPSFRLTGVGPPQPDETDALQQVGWKLAQFAHTIRVDFQYRGLVAATLADLEPFMLQPEGEEDPNEEPEVIAVNSVFEMHRLLAQPGALEKVLGTVRAVRPRIVTVVEQEANHNSGTFLDRFTEHYYYSTMFDSWXSLHYYSTMFDSLEGGSSGGGPSEVSSXGAAAAPAAAGTDQVMSEVYLGRQICNVVACEGAERTERHETLGQWRNRLGNAGFETVHLGSNAYKQASTLLALFAGGDGYKVEEKEGCLTLGWHTRPLIATSAWRLAAP

SEQ ID NO: 235 - protein, 448 aa, Zea mays
MGVAGHSCMSFDPESADVARDATRGPVQSRVAEVAVHEPVAPPRALSLPNPHPPPLSRGIALPPARRYISFLCPRFSASMTAQNPPTGQDTQSRATPPTIGDQQPAAGASCLKTPSRSRTEDWQAQPKPPLLVLGFIASNPDHIMGQPVTRRRERDAEAELDLPPGFRFHPTDDELVEHYLCRKAAGQRLPVPIIAEVDLYRFDPWDLPERALFGAREWYFFTPRDRKYPNGSRPNRAAGDGYWKATGADKPVAPRAAAADARTLGIKKALVFYAGKAPRGVKTDWIMHEYRLADAGRAAAAKKGSLRLDDWVLCRLYNKKNEWEKMRLGKGAAAGAVKEEEAMDMSTSHSQITHSWGETRTPESEIVDNDLPFPDPAMMVPKKERVDDGGSARTSDLFVDLSYDDIQGMYSGLDMLPPAGEDLYSSLFASPRVRGNQPTGPAGLGPF

SEQ ID NO: 236 - protein, 501 aa, Ampelopsis megalophylla
  misc_feature (231)..(258): Xaa can be any naturally occurring amino acid
SDMAEVAQKLEQLEEVIVNAQEDGLSHLASETVHYNPSDLSNWLESMLSEFNPTPNCPLDNPFLPPISQSSAISPLDYTNCSTQPKQEPSLFDSPSLDYDLKAIPGKALYSHIEQPPQQPPPPPLYQRENKRLKPTTSATANSVSSIIGGWGVPTESARPVVLVDSQETGIRLVHTLMACADAVQQENLKLAEALVKQIGFLAVSQAGAMRKVATYFAEGLARRIYRLYPXXXXXXXXXXXXXXXXXXXXXXXXXXXXTANQAILEAFEGKKRVHVIDFSMKQGMQWPALMQALALRPGGPPSFRLTGIGPPSTDNTDHLHEVGWKLAQLAETIRVEFEYRGFVANSLADLDASMLELRDGESVAVNSVFELHSLLARPGGIERVLSAVKDMKPDIVTIVEQEANHNGPVFLDRFTESLHYYSTLFDSLEGCGVSPVNTQDKLMSEVYLGQQICNVVACEGPERVERHETLAQWRARLGSAGFDPVNLGSNAFKQASMLLA

SEQ ID NO: 237 - protein, 278 aa, Arabidopsis thaliana
MNIVSWKDANDEVAGGATTRREREVKEDQEETEVRATSGKTVIKKQPTSISSSSSSWMKSKDPRIVRVSRAFGGKDRHSKVCTLRGLRDRRVRLSVPTAIQLYDLQERLGVDQPSKAVDWLLDAAKEEIDELPPLPISPENFSIFNHHQSFLNLGQRPGQDPTQLGFKINGCVQKSTTTSREENDREKGENDVVYTNNHHVGSYGTYHNLEHHHHHHQHLSLQADYHSHQLHSLVPFPSQILVCPMTTSPTTTTIQSLFPSSSSAGSGTMETLDPRQM

SEQ ID NO: 238 - protein, 138 aa, Arabidopsis thaliana
  misc_feature (73)..(73): Xaa can be any naturally occurring amino acid
  misc_feature (121)..(121): Xaa can be any naturally occurring amino acid
PKISSSKVNVKKRMVNLLRKNWEEKKNTVAPEKERSRRHMLKERTRREKQKQSYLPLHSLLPFATKIQCLEAXLHYLKSMGTKLKTVHANFSPQEFSATMTIETQIRGEEVEKRVERRLQXTEWKLLFLPEASFYKEY

SEQ ID NO: 239 - protein, 239 aa, Yarrowia lipolytica CLIB122
MENTEGYIEEREGDLEYDRMMEYEQGQEGDHEHDPHGEHGGAADNGLDQMTGTFNNVAQGLSGHYRSIMLAYWQEIISSIEHDEHEFKVHQLPLARIKKVMKADEDVKMISAEAPILFAKGCDIFITELSMRAWIHAEEHKRRTLQRSDIASALQRSDMFDFLIDIVPREEATLPPGARSRQTQSAAAAAAAAAAMYMGDEEEEYLQESLEEGHQMEGGVPGVIPTHPLQEQMGMFQQE

SEQ ID NO: 240 - protein, 759 aa, Zea mays
MPDLPCDGDGVCMVCRVASPPEVDLLTCSTCTTPWHSPCLSKPPALADAASWSCPDCSPDSAAVAAPSGPANTLVAAIRAIEADHTLSDQEKARRRQALLTGDAPDGADDDDDEASDDALEIVGKNFSCVFCMKLPERPVTTPCGHNFCLKCFQKWIQNQKRTCGKCRAQIPAKMAEQPRINSALVEVIRMAKISKNPNSAGSAVPYHYLRNDDRPDKAFTTDRAKRAGKANASSGQIFVTIAPDHFGPILAENDPRRNMGVRVGETWEDRLECRQWGAHFPHVAGIAGQSTHGAQSVALSGGYEDDEDHGEWFLYTGSGGRDLSGNKRTNKEQSSDQKFEKLNAALRISCLKGYPVRVVRSHKEKRSSYAPESGVRYDGVYRIEKCWRKIGIQGKFKVCRYLFVRCDNEPAPWTSDDHGDRPRPLPKIKELQGATDITERKGRPSWDYDDKDGWKWVVPPPVSRKPVLSGDPETDKQIRRATKRVHLSVAERLLKEFACSICRAVIKEPLTTPCAHNFCKTCLLGAYDSQSSIRERSRGGRTLRAQKIVKTCPSCPTDICDFLENPQINREMMELIETLQRKAVEEAKMTSDDAEECGDGDSEENDGDLVKGEDVSGLNEGEQDSADADANVEGSVKIVVEIKEEGKDDKRSKMGATEVVDVLVDEDAVKQTKKRKVDAEAGTNGGKRMKSSSTVEEVAVCVTPVKRSRKSGDMDDERNGSPAVSSGRRVTRSSVDDTGSADSPARRTRSRARADAGC

SEQ ID NO: 241 - protein, 245 aa, Citrus unshiu
MARGGRVELKRIENKINRQVTFAKRRNGLLKKAYELSVLCDAEVALIIFSNRGKLYEFCSSSSMLKTLERYQKCNYGAPEPNVSAREALELSSQQEYLKLKARYEALQRSQRNLLGEELGPLNSKELESLERQLDMSLKQIRSTRTQYMLDTLTELQHKEQLLSEANKTLKQRLMEGYQVNTLQLNPSAEDCGYGLKPAQPQGDTFFHALECEPTLQIGYQPADPISVVTAGPSLNNYMQGWLPC

SEQ ID NO: 242 - protein, 244 aa, Citrus unshiu
MGRGRVQLKRIENKINRQVTFSKRRSGLLKKAHEISVLCDAEVALIVFSTKGKLFEYSTDSCMERILERYERYCYAERQLQANEIEPNGNWTLEYSKLKARMEVLQRNQKHFMGEDLADLSLKELQSVEQQIDSGLKLIRSRKNQLMLQSISELQKKDKLLKEQNNLLAKKVKEKEKLLSQEAQCREQQQQLNHDWNSSNVHLMQTLTNSSYQMGGGSGEEDEDTPTGHRANALLPAWMLRHLH

SEQ ID NO: 243 - protein, 229 aa, Cucumis melo
MSSSKEQSPSPETESSSSSSSDSNKKPKRINSNSSSNSKHAVYRGVRMRNWGKWVSEIREPRKKSRIWLGTFPSPEMAARAHDVAALSIKGNSAILNFPDLVHLLPRPVSLAPRDVQAAAAKAAHMHNLSSNANTNNHNTNSNSSSAFSDELSEIVELPALGTSYDGGVGVGGEFVFVESELESAAWLYQPPWVQSLQEDYDDIDGDGDCGKLGMGFVSNGFKGFLFDY

SEQ ID NO: 244 - protein, 622 aa, Arabidopsis thaliana
MAIQTQLPCDGDGVCMRCQVTPPSEETLTCGTCVTPWHVSCLLPESLASSTGDWECPDCSGVVVPSAAPGTGISGPESSGSVLVAAIRAIQADVTLTEAEKAKKRQRLMSGGGDDGVDDEEKKKLEIFCSICIQLPERPVTTPCGHNFCLKCFEKWAVGQGKLTCMICRSKIPRHVAKNPRINLALVSAIRLANVTKCSGEATAAKVHHIIRNQDRPDKAFTTERAVKTGKANAASGKFFVTIPRDHFGPIPAANDVTRNQGVLVGESWEDRQECRQWGVHFPHVAGIAGQAAVGAQSVALSGGYDDDEDHGEWFLYTGSGGRDLSGNKRVNKIQSSDQAFKNMNEALRLSCKMGYPVRVVRSWKEKRSAYAPAEGVRYDGVYRIEKCWSNVGVQGLHKMCRYLFVRCDNEPAPWTSDEHGDRPRPLPDVPELENATDLFVRKESPSWGFDEAEGRWKWMKSPPVSRMALDTEERKKNKRAKKGNNAMKARLLKEFSCQICRKVLSLPVTTPCAHNFCKACLEAKFAGITQLRDRSNGVRKLRAKKNIMTCPCCTTDLSEFLQNPQVNREMMEIIENFKKSEEEAEVAESSNISEEEEEESEPPTKKIKMDNNSVGDTSLSA

SEQ ID NO: 245 - protein, 165 aa, Cucumis melo
MELPVEEDNDDEFSPLNLIRYHLLQDSHSFSTLRDFGFKLEFEDFEYVKPSEEEEEEPPIQSPKRHPERQSPRSSSPDGGRRYRGVRRRPWGKFAAEIRDPSRKGSRVWLGTFDSDVDAARAYDSAAFKIRGRKAKLNFPLDAGKSDPPPGNGRKKKRRETNLNA

SEQ ID NO: 246 - protein, 353 aa, Oryza sativa (japonica cultivar-group)
MEEGGRGVKRPFFTTPDELLEEEYYDEQLPEKKRRLTPEQVHLLERSFEEENKLEPERKTELARKLGLQPRQVAVWFQNRRARWKTKQLERDFDRLKASFDALRADHDALLQDNHRLHSQVMSLTEKLQEKETTTEGSAGAAVDVPGLPAAADVKVAVPDAEEPALEEAAAAFEEQQEQQVKAEDRLSTGSGGSAVVDTDAQLVVGCGRQASRRRGQQRGVVLPGRRRVPRLRDGPHGPRRGGHPVGGGRRRRQRRGLQLLRRRRRRPLRRPRPPPPPPTRGRRQGGRPADQLLVDVELDFSRARVVVHSILVLKKSFSFSFFRFFVCNVEFRSAMRRKEVYACAWYGRVTHR

SEQ ID NO: 247 - protein, 273 aa, Cucumis melo
MCGGAIIADLIPRRDGQRVTASDIWPNSSFFHFNKIRSDQVSTPLKRTPLPASSEASKPKKRQRKNLYRGIRQRPWGKWAAEIRDPRKGIRVWLGTFNTAEEAARAYDREARKIRGKKAKVNFPNEDDAYSIQAPIPQFHPHLYTVPENSEFPYDLNQIGDFTGTHFPVAIEEQSGSGSEDSYSPPKRFGVKEAEDQKPEQKVSVIAAAEEENEVQKLSEELMAYENYMKFYQIPYLDGQSTVTNPAEEQVVGDLWSFDDEDGLHGSVSSSEL

SEQ ID NO: 248 - protein, 336 aa, Arabidopsis thaliana
MELALSLGDNTKKQFSFMEKNSKINNPSVSSTSTSEKDLGFCMALDVAFGGHRSLSSSSSPSVEDEKKKPAPRAKKSDEFRVSSSVDPPLQLQLHFPNWLPENSKGRQGGRMPLGAATVVEEEEEEEEAVPSMSVSPPDSVTSSFQLDFGIKSYGYERRSNKRDIDDEVERSASRASNEDNDDENGSTRKKLRLSKDQSAFLKDSFKEHSTLNPKQKIALAKQLNLRPRQVEVWFQNRRARTKLKQTEVDCEYLKRCCESLTEENRRLQKEVKELRTLKTSTPFYMQLPATTLTMCPSCERVATSAAQPSTSAAHNLCLSTSSLIPVKPRPAKQVS

SEQ ID NO: 249 - protein, 247 aa, Oryza sativa (indica cultivar-group)
MEGSQLETACLPAALYAPLCPYTPPSPPSFLAPLPSLQHKLPQLPQLVHDHAAATGTNHGVMFSSDHGCLYPLLPGIPFCLDSGCGAAACDDDKPAGFAHLGSAEADTSAAAAARVDSEIAAAATATTCHGPNSWWKGTEKGKMKVRRKMREPRFCFQTRSDVDVLDDGYKWRKYGQKVVKNSLHPRSYYRCTHNNCRVKKRVERLSEDCRMVITTYEGRHTHTPCSDDATTGAAGDHTASCAFTSF

SEQ ID NO: 250 - protein, 247 aa, Ipomoea nil
MEFQSDQSREMSPQRKMGRGKIEIKRIENTTNRQVTFCKRRNGLLKKAYELSVLCDAEVALIVFSSRGRLYEYANNSVKATIDRYKKACSDSTNTGSISEANTQFYQQEANKLRQQISNLQNQNRNYMGEGLGGFNLRDLKNLESKIEKGISKIRAKKNELLFAEIDYMQKRQEIDLHNNNQYLRAKIIETERAQQQQQQMNLMPGSSSYHELAPPQQFDARNYLQLDGFQSTSSYSKQDHLPLQLV

SEQ ID NO: 251 - protein, 230 aa, Beta vulgaris
  misc_feature (199)..(199): Xaa can be any naturally occurring amino acid
  misc_feature (212)..(212): Xaa can be any naturally occurring amino acid
MGRGKIEIKRIENTTNRQVTFCKRRNGLLKKAYELSVLCDAEVALIVFSSRGRLYEYANHSVKGTIDRYKKACSNQSGAGSVAEANAQYYQQEAAKLRNQIRTATENNRLLSRHMMGEGLSSLSMKELKNLETKLERGISRIRSKKNELLFAEIEFMQKREIELHNNNQFLRARISENERAQQSMSLMPGGSDYDLVPXQSFDSRNYFQVNXLQPSSQYARQDQTPLQLV

SEQ ID NO: 252 - protein, 244 aa, Ipomoea nil
MEFPNQALEEEESSHRKSGRGKIEIKRIENTTNRQVTFCKRRNGLLKKAYELSVLCDAEVALIVFSTRGRLYEYANNSVRATIDRYKKHHSDSTNTGSVSEANTQFYQQESAKLRRQIREIQTSNKQILGESLGVLNHKELKNLEGKVEKAIGRVRSKKNELLFSEIELMQKREIELQNANMYLRAKISEFERAQQQMNLMPGSEYQETMTTSQTYDAHNFLPLTLLEPNQHYSRHDQTALQLV

SEQ ID NO: 253 - protein, 131 aa, Oryza sativa
SARAFGENMVMSELVECCKELDEVHHALAGHKKEAAWRLSRVELQLESEKAGRRREKMEEIEAKIKALREEQTAALDRIEAEYREQLAGLRRDAESKEQKLAEQWAAKHLRLTKFLEQVGCRSRLTEPNGR

SEQ ID NO: 254 - protein, 208 aa, Triticum aestivum
AEVTPHRSNHPYRVMDNLSFPLICPDWNADEEILLLEGIEMYGLGNWAEVAEHVGTKSKAQCIEHYTTAYMNSPCYPLPDMSHVNGKNRKELLAMAKVQGESKKGIPLLSGDLTPKAESPFSPSRIKMEDALGEGPASRSPSHIPGGANKKASTVGHFKDSANLSKVEDGHMDRSIGVKKPRYSADEGPSLTELSGYNAKRHEFDPEY

SEQ ID NO: 255 - protein, 503 aa, Cayratia japonica
  misc_feature (230)..(243): Xaa can be any naturally occurring amino acid
SDMAEVAQKLEQLEEVIGNAPEDGLSHLASETVHYNPSDLSTWLESMLSEFNPPPNCSLDNPFLPPISQPSAIPPLDYTNCSAKPKQEEPSLFDSPAMDYDLKAIPGKALYSHIEHPPAPAPASSLYQRESKRLKPTTSANSVSSAIGGWGVPTESARPVVLVDSQETGIRLVHTLMACAEAVQQENMKLAEALVKQIGFLAVSQAGAMRKVATYFAEGLARRIYRLYPXXXXXXXXXXXXXXHFYEAYPYLKFAHFTANQAILEAFAGANRVHVIDFGLKQGMQWPALMQALALRPGGPPAFRLTGIGPPPPDNTDALQQVGWRLAQLAETIGVEFEFRGFVANSLADLEPSMLQIRPPEVEAVAVNSVLELHRLLARPGAIEKVLSSIKAMKPKIVTVVEQEANHNGPVFLERFTEALHYYSNLFDSLEGCGVAPPSNQDLMMSEIYLGRQICNVVACEGAERVERHETLNQWRSRIGSAGFEPVHLGSNAFRQASMLLAL

SEQ ID NO: 256 - protein, 366 aa, Arabidopsis thaliana
MGMYEPFQQLSGWESPFKSDINNITSNQNNNQSSSTTLEFDARPEADDNNRVNYTSVYNNSLEAEPSSNNDQDEDRINDKMKRRLAQNREAARKSRLRKKAHVQQLEESRLKLSQLEQELVRARQQGLCVRNSSDTSYLGPAGNMNSGIAAFEMEYTHWLEEQNRRVSEIRTALQAHIGDIELKMLVDSCLNHYANLFRMKADAAKADVFFLMSGMWRTSTERFFQWIGGFRPSELLNVVMPYVEPLTDQQLLEVRNLQQSSQQAEEALSQGLDKLQQGLVESIAIQIKVVESVNHGAPMASAMENLQALESFVNQADHLRQQTLQQMSKILTTRQAARGLLALGEYFHRLRALSSLWAARPREHT

SEQ ID NO: 257 - protein, 426 aa, Zea mays
LAQLCCSIHRSRRRRRIRGGEMMREQSLLEATCGDLFDHIDDLLDFPKEDSAADVLLLDAPAPGSPLSSARIIDVGRAGSAPAPPALAPSLPAQQDTTAFFAAAGPDVFDPRDVGAHLGSCDDIDMDMDMAQLEWLSGLFDDASIPHEPAFPGAAPIIKSSALAAGALLPPDKMEDALLFRSSSPISVLEHGSFNNANGGGGGCSASSESSSASSSSESFSGSGSGSGEGHAWSAPVSPPPVLVIPARARSKRSRPSAFTRAGAEAPTILVPTPMYSSGPSHSDPESIAESSPHPAPPMKKKKKAKKPPAPPAPASSDDNDGDADYEEGGERAEPQGGAVRRCTHCQIEKTPQWRAGPLGPKTLCNACGVRYKSGRLFPEYRPAASPTFVPSIHSNSHKRVVEMRQKAVRSGDPSCDLLQFIRRRD

SEQ ID NO: 258 - protein, 245 aa, Glycine max
MDEYFHQPEKKRRLSVEQVKFLEKSFDEENKLEPERMIWLAKELGLQPRQVAIWFQNRRARWKTKQMEKDYDSLQTSYNDLKANYDNLLREKDKLKAEVARLTEKVLGREKNESHLEQAETNGLQEPLHKSLVDSASEGEGSKVTFEACKQEDISSAKSDIFDSSESPQYTDGVHSALLETGDSSYVFEPDRSDVSQDEEDNLSKTLLPHYIFPKLEDVDYSDPPHGSCNFGIPEEDQAIWSWPY

SEQ ID NO: 259 - protein, 176 aa, Brassica napus
MDLTGAFGARSAAVGACREPPGLESLHLGGGDGGFTALLELPPTQAVELLHFTDPSPSSSQAAVAGVGLDVSPPPPPLHAYGALTFPSNAALMERAARFSVMANEQQNGNVSGETTTTSSVPSNSDRVKTEPGETDSSQRLENNRCGKRKARQEVKAHEEKSKALRDESCLCHVRA

SEQ ID NO: 260 - protein, 99 aa, Brassica rapa subsp. pekinensis
SFLFNLNDQFVLDAYGKGDKLKFANHSPEPNCYAKVIMAAGDHRVGIFAKERILAGEELFYDYRYEPDRAPAWARKPEASGSKKDENVTPSVGRPKKVA

SEQ ID NO: 261 - protein, 603 aa, Oryza sativa (indica cultivar-group)
MDTLFRLVSLHHHHHHQHAASPSPPDQPHKSYPSSRGSTSSPSSHHTHNHTYYHHSHSHYNNNSNTNYYYQGGGGGGGGYYYAEEQQPAAYLEECGNGHQFYMDEDFSSSSSSRQFHSGTGAPSSAPVPPPPSATTSSAGGHGLFEAADFSFPQVDISLDFGGSPAVPSSSGAGAGAGAAPSSSGRWAAQLLMECARAVAGRDSQRVQQLMWMLNELASPYGDVDQKLASYFLQGLFARLTTSGPRTLRTLATASDRNASFDSTRRTALKFQELSPWTPFGHVAANGAILESFLEAAAAGAAAASSSSSSSSTPPTRLHILDLSNTFCTQWPTLLEALATRSSDDTPHLSITTVVPTAAPSAAAQRVMREIGQRLEKFARLMGVPFSFRAVHHAGDLADLDLAALDLREGGATAALAVNCVNALRGVARGRDAFVASLRRLEPRVVTVVEEEADLAAPEADASSEADTDAAFVKVFGEGLRFFSAYMDSLEESFPKTSNERLSLERAVGRAIVDLVSCPASQSAERRETAASWARRMRSAGFSPAAFSEDVADDVRSLLRRYKEGWSMRDAGGATDDAAGAAAAGAFLAWKEQPVVWASAWKP

SEQ ID NO: 262 - protein, 254 aa, Zea mays
  misc_feature (175)..(175): Xaa can be any naturally occurring amino acid
  misc_feature (193)..(193): Xaa can be any naturally occurring amino acid
  misc_feature (204)..(204): Xaa can be any naturally occurring amino acid
  misc_feature (211)..(211): Xaa can be any naturally occurring amino acid
  misc_feature (215)..(217): Xaa can be any naturally occurring amino acid
  misc_feature (220)..(220): Xaa can be any naturally occurring amino acid
  misc_feature (223)..(223): Xaa can be any naturally occurring amino acid
  misc_feature (225)..(225): Xaa can be any naturally occurring amino acid
  misc_feature (228)..(228): Xaa can be any naturally occurring amino acid
  misc_feature (238)..(238): Xaa can be any naturally occurring amino acid
  misc_feature (241)..(241): Xaa can be any naturally occurring amino acid
  misc_feature (245)..(246): Xaa can be any naturally occurring amino acid
  misc_feature (251)..(251): Xaa can be any naturally occurring amino acid
SLPCAVTSMELLHAVIHGAATTTTTTTTTTTSSSATVTSGDEGAHLPQGWAKKKRSRRQRSEEENLALCLLMLSRGDRHRVQAPPPPVPSAEFRCSVCGKSFGSYQALGGHKTSHRVKLPTPPAAHVQLPAPPAVALLVEAPAPPPPATSSTSDGAAAGRVHRCTICHKEFPTGXALGGHKRKHYDGGAAAAXTSEVGSSGNEXSAARAFXLNLXXXVRXFAXRXGAXPGKMWDEDQXVQXPLAXXKPRLXMTA

SEQ ID NO: 263 - protein, 96 aa, Glycine max
MLPFVRELLQLVLRANLMLFYFEGLYYHIPKRAASIRYVFIGKASNQRPRYQILGVFLLIQLCILAAEGLRRRNFTSIAGSVHQASFTNHDRSAGY

SEQ ID NO: 264 - protein, 444 aa, Solanum lycopersicum
MAQSNSKPPMSSQNFGVGAVSHVRSLSQSSIFSNSCLPPLSPFPPSEPGMVSGHSSLKDISMEEADVNSQGVGVVSSFTRDGLPPRKGHRRSNSDVPLGFSAMIQSSPQLMPISGQKVLGRAVSLGDSNGKIDERKPKGEVTDELLFSYMNLENIETLNGSGTKDRDKDSIVSGTKVTGSESSNNEAESVMKGNNVSIQPTNLREGTKRSADANIAPAARHFRSLSMDSAIGNFHYGDESPNLPTSLMMRSGQLSPSNSGNESSSKHNLDFGNSEFSEAEMKKIMADERLAEIAVLDPKRAKRILANRLSAARSKERKTRYISELEHKVQKLQTETTTLSTQVTILQKNFVEISSLNSELKFRIQAMEQQAQLRDALHEALTAEVQRLKLAAGEHREEGRLPNNMTQQTPVKHNIFQMQRQQPSQMQQLSVGKASAASATPASA

SEQ ID NO: 265 - protein, 203 aa, Arabidopsis thaliana
MNTSEVRVPRGNRRRKAVIDLNAVPVDQEGTSASVRTLTVPITPSQPAPTMIDVDAIEDDVIESSASAFAEAKSKSRNARRRPLMVDVESGGTTRFPANISNKRRRIPSSESVIDCEHASVNDEVNMSSRVSRSKAPAPPPEEPKFTCPICMCPFTEEMSTKCGHIFCKGCIKMAISRQGKCPTCRKKVTAKELIRVFLPTTR

SEQ ID NO: 266 - protein, 250 aa, Zea mays
LAMAPPRRPSMGRQKIEIRRIESDEARQVCFSKRRAGLFKKASELSILCGADVAAVVFSPAGKAFSFGHPSVESVVERFLASSSPSPAGAGAGHSASGGEDRAVSELNRQHGELRAQLDAVKARQERADEAIRKEREAGSPAMAWIDAELSGGAMGHDDLVAFWAALAGVQAAVAASADRLLRDALLVGRRGRQQQQPAQLAGGGGVAFDVGAFGGVGVQVQPPPGFAGVVDLQGFGGQAAAILGAGGPS

SEQ ID NO: 267 - protein, 566 aa, Papaver rhoeas
SSPSPAIKSSDESEKIVDMDDDAEMMVDVDVDVDVDVEVRCLENKQETPNSSSSVSDEEEEDLNCSGSSLSVRSASSNRRISGPIRRAKGGWTPEEDEKLRKAVESFKGKNWKKIAACLPHRTELQCLHRWQKVLHPDLVKGPWTLEEDDKIMELVSKYGPSKWSLIAKELPGRIGKQCRERWHNHLNPEIKRDAWTVEEEVALMNAHRLYGNKWAEIAKVLPGRTDNAIKNLWNSSLKKKLDFYLSSGQLPPLGPVLKTEDYALAMSRSSAAGNSIICLDEEINTGTQRSLEKDDSNKFGEGTMVLVQPSTPEFLDREVPTGVRAIKSSNSDDIEGKQLASENYYSCSKSFSTPNPVQYRSSAVADPEKNIAATTLQMAVPVSSPSLFEMSDSNSVLSPSSFLTPPRIRNNGLDLQSAESILKNAAKSFQNTPSILRKRRREAGGTPNRIVQTNGLTAEDKLHSLEREKIEDCKETPGSMESNSSTGRVNSTIRLFYTRKKHRPCRSRVERPDACKSLEKQLESTLDGVNTGNSQYESMKSASDQQGKSTTKEDGHDPLQNSVAS

SEQ ID NO: 268 - protein, 283 aa, Arabidopsis thaliana
MAPRQKKPNKSDDDDDLRRKKQSFFKQRFPGFKKKASELSVLCGNSVGFICYGPDSDLHVWPQSQDHNPQALHEIVAKFNALSDERRKNHACDLNDFPHHLKGLSREELRKHLLHLDSQLLGVREQKIEILKKTLTGSSEKDGARVSENSAISDHKLKIEPHLKDILSEDHLIRVSDKKLGSCDVFDELAYVVRGSRNLNENVSKYESKDADNTGLDHLVTLGGDYLQEAAAELYQTYNLGNFCDDHVWDLEFASRLPLLHTFSDPLMTTNTCQTMSTDMISI

SEQ ID NO: 269 - protein, 483 aa, Glycine max
MLANNLSPSSVPTSEPFPCTENGTATNKRKRRPAGTPDPDAEVVSLSPKTLLESDRYVCEICNQGFQRDQNLQMHRRRHKVPWKLLKRETPVVRKRVFVCPEPTCLHHDPCHALGDLVGIKKHFRRKHSNHKQWVCERCSKGYAVQSDYKAHLKTCGTRGHSCDCGRVFSRVESFIEHQDACNMGRLRPHESQPLQPSACLSRTASSPSPSSETNFSTAPWPTRMIIQKPSETPTIFMNNPITAITTAETSSKSNNKLLHPNLDLQLSTPTNNNNSNTSNTNTSNIANPIDNAAISAKRDHYHENHSTHLQLSIGSSDMSEKNDQSNRNSSEKSSNNSNNINDQNNKQQSNNMALLRVQEQAREHLRIAMAEKAYAEEARKQAKRQIELAEQEFTNAKRIRQQAQVELDKAYALKEHAMKQINSTMLQITCHFCKQQFQARNATTTSPDDNSLVLSYVSSAITTEGGEVENDNIAKDHAKDNN

SEQ ID NO: 270 - protein, 317 aa, Oryza sativa (indica cultivar-group)
MARSMLRNHPEASVLDTIRQHLLEEPRGGGGGEAAEASFGSLVADMWSDSLPFRDDDADDMVVFGAMRDAFSCGWLPDGVFAEVKPEPLLSPDSSSYDGSSCCFGFADVSEPVTPSDAASGAAEAAAAAAAATAEHGKEEEAAAAVARGKHYRGVRQRPWGKFAAEIRDPAKNGARVWLGTFDTAEDAALAYDRAAYRMRGSRALLNFPLRIGSEIAAAAAAAAAAAAGDKRPSPEPATSESSFSSSSSCTTTTTSSSTSSSGSPKRRKRGEAAAASMSMPLVPPPSQLNWPVQAWYPAAAPVEQVAITPRVEQLVI

SEQ ID NO: 271 - protein, 229 aa, Nicotiana tabacum
MVEISPGFRFYPTEEELISFYLLNKLEGKRPELDRVIPVVTIYNLDPWHLPNLPGELCMGDTEQWFFFVPRQEREARGGRPCRTTTSGYWKATGSPTYVYSSESKVIGVKKSMVFYKGKAPTGRKTKWKMNEYRAIEQETSTSSSFSIPKLRHEMSLCRVYVISGSFRAFDRRPVATVTRDTAAVKIQELAGDRDNISSAISVKNESKSYNIVESDFENLNGWEQINWM

SEQ ID NO: 272 - protein, 327 aa, Arabidopsis thaliana
MDLTQGFRARSGVVGPVAGLESLNFSDEFRHLVTTMPPETTGGSFTALLEMPVTQAMELLHFPDSSSSQARTVTSGDISPTTLHPFGALTFPSNSLLLDRAARFSVIATEQNGNFSGETANSLPSNPGANLDRVKAEPAETDSMVENQNQSYSSGKRKEREKKVKSSTKKNKSSVESDKLPYVHVRARRGQATDNHSLAERARREKINARMKLLQELVPGCDKIQGTGLVLDEIINHVQTLQRQVEMLSMRLAAVNPRIDFNLDSILASENGSLMDGSFNAESYHQLQQWPFDGYHQPEWGREEDHHQANFSMGSATLHPNQVKMEL

SEQ ID NO: 273 - protein, 970 aa, Oryza sativa
  misc_feature (759)..(759): Xaa can be any naturally occurring amino acid
MEAARVGAQSRHLYGGGLGEPDMDRRDKRLFGWDLNDWRWDSDRFVATPVPAAEASGLALNSSPSSSEEAGAASVRNVNARGDSDKRKRVVVIDDDDVEDDELVENGGGSLSLRIGGDAVAHGAGVGGGADEEDRNGKKIRVQGGSPSGPACQVEGCTADLTGVRDYHRRHKVCEMHAKATTAVVGNTVQRFCQQCSRFHPLQEFDEGKRSCRRRLAGHNRRRRKTRPEVAVGGSAFTEDKISSYLLLGLLGVCANLNADNAEHLRGQELISGLLRNLGAVAKSLDPKELCKLLEACQSMQDGSNAGTSETANALVNTAVAEAAGPSNSKMPFVNGDQCGLASSSVVPVQSKSPTVATPDPPACKFKDFDLNDTYGGMEGFEDGYEGSPTPAFKTTDSPNCPSWMHQDSTQSPPQTSGNSDSTSAQSLSSSNGDAQCRTDKIVFKLFEKVPSDLPPVLRSQILGWLSSSPTDIESYIRPGCIILTVYLRLVESAWKELSDNMSSYLDKLLNSSTGNFWASGLVFVMVRHQIAFMHNGQLMLDRPLANSAHHYCKILCVRPIAAPFSTKVNFRVEGLNLVSDSSRLICSFEGSCIFQEDTDNIVDDVEHDDIEYLNFCCPLPSSRGRGFVEVEDGGFSNGFFPFIIAEQDICSEVCELESIFESSSHEQADDDNARNQALEFLNELGWLLHRANIISKQDKVPLASFNIWRFRNLGIFAMEREWCAVTKLLLDFLFTGLVDIGSQSPEEVVLSENLLHAXAVRMKSAQMVRFLLGYKPNESLKRTAETFLFRPDAQGPSKFTPLHIAAATDDAEDVLDALTNDPGLVGINTWRNARDGAGFTPEDYARQRGNDAYLNMVEKKINKHLGKGHVVLGVPSSIHPVITDGVKPGEVSLEIGMTVPPPAPSCNACSRQALMYPNSTARTFLYRPAMLTVMGIAVICVCVGLLLHTCPKVYAAPTFRWELLERGPM

SEQ ID NO: 274 - protein, 204 aa, Oncidium Gower Ramsey
MGRGKIEIKKIENPTSRQVTYSKRRLGITKKAMELTVLCDAKVSLIMFSSSGKLSDYCSPSTEIKDAFQRYQQVTGFDIWDAQYQRMQSTLMNLREVNHKLQMEIRQRKGENLEGLDVKELRGLEQKLEESIKIVRERKYHVIATQTDTYKKKLRSTREMYPALLNELQEVDDENQQRSFIAEDLSGVYNSAISMANQRLAHCL

SEQ ID NO: 275 - protein, 354 aa, Aspergillus nidulans FGSC A4
MQAAQLSWELENAVTLIDPQRDSLYRYDEETHKYLSDTRPWTKDPHYFKSVRISAVALLKMVMHARSGGSLEVMGLMQGYILPNTFVVTDAFRLPVEGTETRVNAQDEANEYMVSYLQSCREAGRMENAVGWYHSHPGYGCWLSGIDVSTQDMQQMSGPFVAVVIDPERTISAGKVDIGAFRTFPKDYTPPKEEQEEDEYQTVPLNKAEDFGAHASHYYSLEVSLFKSALDTEILSLLWNKYWVATLSQSPLFTTRDYGSKQMLDLSQKTRRVARGIESNPPRGGAPTQVRDQQLERVVKDGQRIVSEEVKGLLAAEVKMQLFQVGMHQAWASVTADLGPHNAKQPSISYRGGT

SEQ ID NO: 276 - protein, 551 aa, Zea mays
MAADDAARSSRRMDLNLYLGLPRAPRAPRPDLGSDLALGTPMLSSSSPSSSAASADAPPLETDPLHPPYSPSRAELVRPPTPVHEPYSPFAPEAHPPYVPPPPLPVPGALPVLADELEFGFSDAQLGLVERLDRPSSSTASSSFRPDRAERYRRLMSLGGSRYFRPRRFRSDLPPLSSEAPSLENDAAVQPPEPEEPVHDTVEENKVAAEGAVVGVSEDDGTEHGKSTAMFECNICFEMADEPVVTSCGHLFCWPCLYQWLHVHSSHKECPVCKGEVTEGNITPIYGRGNSGSAMEKVAEDGNASGPKIPPRPHGNRLESFRQQFHHLRPISRRLGEAHGFLSTWRRIFDQHLANSMSRFEGTPELSVSETAQHASRLGRMTTRLRARRLQREAENPTSIVSSAPDSGQPRNNTPDLPRRSSSPFPSEGMDLLRQIAFAGLEDSERFATAVSELRRIARPSHYGASTSSNPPTNPEPIDGTHIAMALAADQASNSSTMAVIQEDAAFAESAGEPSNAGSSRSLRRRRGSGALGSLDVDGGDLHQNKRRRLN

SEQ ID NO: 277 - protein, 547 aa, Oryza sativa (japonica cultivar-group)
MGPRGVVGSAAMLGLEMHLAHPQMHAAAYQQPDPHGGGGGGFQQQVAAVRQQQQQSYSPYSAGASSRVIKAPGHDDGMGNGAGKGGVVQQQQQPGSVGCPWTRMKWTDGMVRLLINVVYSVGDDGDGVAAGGAAGGKASAGAAGHGKAGGSGSHGAHGQAAAQQKKGKWKSVSRAMMESGHMVSPQQCEDKFNDLNKRYKRVVDLLGRGKACKVVENHALLDAMDELTHKAKDEARKLLSSKHLFFREMCAYHNSGAAAAAAAHGPHGAGAAGVEATACFHHPPPASMAAASSAARQAAAAAPSLGMKDSSAGPEDDEDDSEDVPSSNEVDDEDDDDDDDDDEVGPGMKSRRIYGGHRVHHHHHHHNGHHKRRRGDDVSSAGAGDDDDEDGVKRARGAASAAGGGDDEGPSAVQQLQSELAAAVAGGGDPQQVRQWVRRRTVEVEEQQVAHEVRAYHLERQRLKWERFRANKERDMERARLRNDRLRIDGRRMLLLLRQKDLDFDIAEANSSSVDHLTSSAPPPLAALQQQQQPLGSSPSTAGGHPN

SEQ ID NO: 278 - protein, 300 aa, Arabidopsis thaliana
  misc_feature (91)..(91): Xaa can be any naturally occurring amino acid
MGRTPCCDKIGLKKGPWTPEEDEVLVAHIKKNGHGSWRTLPKLAGLLRCGKSCRLRWTNYLRPDIKRGPFTADEEKLVIQLHAILGNRWAXAIAAQLPGRTDNEIKNLWNTHLKKRLLSMGLDPRTHEPLPSYGLAKQAPSSPTTRHMAQWESARVEAEARLSRESMLFSPSFYSGVVKTECDHFLRIWNSEIGEAFRNLAPLDESTITSQSPCSRATSTSSALLKSSTNSWGGKEVTVAIHGSDYSPYSNDLEDDSTDSALQLLLDFPISDDDMSFLEENIDSYSQAPPIGLVSMVSKF

SEQ ID NO: 279 - protein, 305 aa, Triticum aestivum
  misc_feature (220)..(220): Xaa can be any naturally occurring amino acid
  misc_feature (237)..(237): Xaa can be any naturally occurring amino acid
MAACRGGGGGKDVDRIKGPWSPEEDDALQRLVGRHGARNWSLISKSIPGRSGKSCRLRWCNQLSPQVEHRPFTPDEDDTILRAHARFGNKWATIARLLSGRTDNAIKNHWNSTLKRKYSSSSSASASPAEDGAAMANDDEDRRPLKRTSSDGYPGLCFSPGSPSGSDLSDSSHQSLPSVMPSAASQQPHVYRPVARAGGVVVLPTATPQPPQPSPPSPPXPPPPPPGRSFSLSLSLXPGLDAPEPAPVAAAYVHGRRHLAPVQPAAAPQMPPPPPMPFQLQPPPGPPARDGGPLQGGGSCQLFRE

SEQ ID NO: 280 - protein, 121 aa, Brassica napus
ICLIPWGANDGMYLMEVDRVLRPGGYWILSGPPINWKINYKAWQRPKEELQEEQRKIEETAKLLCWEKKYEHGEIAIWQNRVNDDACRSRQDDPRANFCKTDDTDDVWYKKMEACITPYPE

SEQ ID NO: 281 - protein, 318 aa, Oryza sativa (japonica cultivar-group)
MDFPGDAEDFALEFIREHLLGGDAPVLPPAAVPAAAAYLPTSTMFLPQQQRGYAGLTPQEYVVDSAPAADQAAFRDDQPDPAADVMIMFGGERFPAVKPSSSSSPSLTVTVPPSSFGSWAPAAVPAVAATAAAVEDFRKYRGVRQRPWGKFAAEIRDPKRRGSRVWLGTYDTPVEAARAYDRAAFRMRGAKAILNFPNEVGTRGAELWATPPPTNKRKRQPEDDTAAADDVEVIGVANKAVKTEAPTSAYSSSSLSSMSRDTTATTSSAGTSTGSSEPTSFPVVTPSSWSWDQYWDGLPPLSPLSPHPALGFPQLTVS

SEQ ID NO: 282 - protein, 250 aa, Salix discolor
MGRGRVQLKRIENKINRQVTFSKRRTGLLKKAHEISVLCDAEVALIVFSHKGKLFEYSTDDCMEKILERYERYSYEERQLAATDFDSPGNWTLEYNRLKAKVELLQRNHRNYLGEDLDSMSLKELQNLEQQIDTALKHIRARKNHLMSQSISELQRKEKAIQVQNNMLVKQIKEKEKKDKAVAQPALWDDQQNQGPHASSFLLSQPAGLPLPCLNIGGCYQEETDPEVRRNELDHALEPTYSFHLGGYGA

SEQ ID NO: 283 - protein, 150 aa, Zea mays subsp. parviglumis
MDWDLKAAGAWDLAELEQDHAAAAPSSGGHAANAAAAGTGTDSRPPAPGAAGAPAECSVDLKLGGMGECEPGAARREREAAAGAAKRPRPAGPGGQQQQQCPSCAVDGCRADLGKCRDYHRRHKVCEAHSKTPVVVVAGREMRFCQQCSR

SEQ ID NO: 284 - protein, 229 aa, Medicago sativa
MARGKIQIKRIENTTNRQVTYSKRRDGLFKKANELTVLCDAKVSIIMFSSTGKLHEYISPSASTKQFFDQYQMTVGIDLWNSHYENMQENLKKLKDVNRNLRKEIRQGMGECLNDLSMEELRLLEDEMDKAAKAIRERKYKVITNQIDTQRKKSNNEREVHNRLLRDLDARAEDPRFEMMDNGGEYESVIGFSNLGPRMFALSLQPTHPNPHNGGASAASDLTTYPLLF

SEQ ID NO: 285 - protein, 150 aa, Zea mays subsp. parviglumis
MDWDLKAAGAWDLAELEQDHAAAAPSSGGHAANAAAAGTGTESRPPAPGAAGAPAECSVDLKLGGMGECEPGAVRREREAAAGAAKRPRPAGPGGQQQQQCPSCAVDGCRADLGKCRDYHRRHKVCEAHSKTPVVVVAGREMRFCQQCSR

SEQ ID NO: 286 - protein, 357 aa, Oryza sativa
MGRESAAACSPKPKLRRGLWSPEEDEKLFNHISRYGVGCWSSVPKLAGLERCGKSCRLRWINYLRPDLKRGSFSQQEEELIISLHKILGNRWSQIAAQLPGRTDNAIKNYWNSCLKKKLRQRGIDPATHKPLNDGGAGAGEEHHDDGDKQQLMDDVDDCFAIGGGGSSDSLAPPHSPAVSFDPLSVTNVPTTMMQSSSSPYGAAGGEHSSFRSDTLCDYGGSGGGVDVVSDAGTYSAYTGDSSSNSNSTAWTCGSVVVGGAGELPPPPLLPHMDMFGRVDAEPPPYPPFDVQARFSPWHHHHHHHHEPTLPTPPQRLDGGGGAAASFPIRSLSRDMPESCFDLGRGALDDEFGVDFL

SEQ ID NO: 287 - protein, 326 aa, Oryza sativa
MDPRFPPPAPSGGAPPRGHHRRAHSETFIRLPDADLLLDPDGEFGFSDLDFPSLSDDSPAASDPTPPPPPPALPQAAPRPPGGAHLRSLSLDAAFFDGLAFQGGGGGGGAGSGSSGGGAGHKRSGSMDGESSLFEGESAPPDYAKKAMPADRLAELALLDPKRAKRILANRQSAARSKERKIKYTGELERKVQTLQTEATTLSTQLTLLQRDTSGLTAENRELKLRLQSMEEQAKLRDALNDALREEVQRLKIAAGQVPNMNGNSFNGGLQQQQQQQMPTYFSQQQQMHYLSGHQGRHHHPNNPHNSLNGGQSMSGQTLNDSMDFM

SEQ ID NO: 288 - protein, 653 aa, Oryza sativa
  misc_feature (126)..(126): Xaa can be any naturally occurring amino acid
  misc_feature (459)..(459): Xaa can be any naturally occurring amino acid
MAIKGGGGSAENRGRSPLAMVVAVGLCCFFYLLGAWQRRGYGKGDSIAMAVNRQTAACGGVGLSFETHHGGAGVENETMAAPAPEFAACAAAMADHTPCHDQERAMRFPRENMVYRERHCPGDGEXLRCLVPAPPGYVTPFPWPRSRDYVPFANAPYKSLTVEKAVQNWVRHEGRLLRFPGGGTQFPGGADKYIDQLATVVPFADGSVRTVLDTGCGVASLGAYLDARGVIAMSFAPRDSHEAQVQFALERGVPAFIGVLGSIKLPFPPRSFDMAHCSRCLIPWSANGGMYMMEIDRVLRADGYWVLSGPPINWRTNHKAWERTEADLAAEQQLIEEYAAMLCWEKLAEMGEAAVWRKRPDAAVVSCPTATPAPPRTCDAAAASPDDVWYKKMEPCITPPQAAGEVMLRPFPERLTAVPPRVAAGEVPGLTGESYAEENARWERHVAAYRKVNYRLDAXRYRNIMDMNAGVGGFAAAVFSPKSWVMNVVPTAAELSTLGVVYERGLIGIFHDWCEAFSTYPRTYDLIHGNGVFTLYKDKRCKMEDILLEMDRILRPEGTVILRDDIEVLLKVQRIASGMRWKMIMANHEDSPHIPEKVLYAVKRYWTADDKSSEPEPEPEKMKKKAGSSSQERSSEEEEESTASSSEEKGSEE

SEQ ID NO: 289 - protein, 150 aa, Zea mays subsp. parviglumis
MDWDLKAAGAWDLAELEQDHAAAAPSSGGHAANAAAAGTGTESRPPAPGAAGAPAECSVDLKLGGMGECEPGAARREREAAAGAAKRPRPAGPGGQQQQQCPSCAVDGCRADLGKCRDYHRRHKVCEAHSKTPVVVVAGREMRFCQQCSR

SEQ ID NO: 290 - protein, 200 aa, Ostreococcus tauri
MLKIPAVKWTVEEERALRDGVQKYGAGKWRAIQLDPTFGLALNHRSNVDLKDKWRNLHANGGSAEAEPTATEVKLGAMTREVSSSGREQSGEKAAKRRKEDESEDASGGRALTGAHEAQVNELMAETQRAKREAETALAAATEAEREAERAEREAWEAEKLASELVTEAHRQKVGLPVEGAEDVADVAAELLDEDERGGG

SEQ ID NO: 291 - protein, 337 aa, Brassica juncea
MLKQESNWAQTCDTCRSAACTVYCRPDSAYLCTSCDAQIHEANRLASRHERVRVCQSCERAPAAFFCKADAASLCTACDSQIHSANPLARRHQRVPILPISGSMVTNHSSETTEAEDIVVVGQEEEDEAEAASWLLPTSVKNCGDNNNNNNNSQDNRFSVGEEYLDLVDYSKYQQDYNVPQRRSYVADGVVPLQVEVSKSLSHMHHEQHNFQFGFTNVSSEASPIHMVSLVPESSLSETTVSNPRSPKAATEELPEAPVQMLSPMERKARVMRYREKKKTRKFEKTIRYASRKEYAEKRPRIKGRFAKRNEVDAEEADKAFSSMVMFDTGYGIEPSF

SEQ ID NO: 292 - protein, 150 aa, Zea mays subsp. parviglumis
MDWDLKAAGAWDLAELEQDHAAAAPSSGGHAANAAAAGTGTESRPPAPGAAGAPAECSVDLKLGGMGECEAGAARREREAAAGAAKRPRPAGPGGQQQQQCPSCAVDGCRADLGKCRDYHRRHKVCEAHSKTPVVVVAGREMRFCQQCSR

SEQ ID NO: 293 - protein, 210 aa, Arabidopsis thaliana
MVRGKIEMKKIENATSRQVTFSKRRNGLLKKAYELSVLCDAQLSLIIFSQRGRLYEFSSSDMQKTIERYRKYTKDHETSNHDSQIHLQQLKQEASHMITKIELLEFHKRKLLGQGIASCSLEELQEIDSQLQRSLGKVRERKAQLFKEQLEKLKAKEKQLLEENVKLHQKNVINPWRGSSTDQQQEKYKVIDLNLEVETDLFIGLPNRNC

SEQ ID NO: 294 - protein, 308 aa, Oryza sativa (indica cultivar-group)
MKNKGSSCRYLPHSSAPCATDGARCFRCDHRPAIDEIVREQSLVTQLRAVVLPALETKADDGRAEIVAQLFGSILDCSRKVISALNSRYVGESPPDDDEIVDKRRAKRKNSEGKKGDDQVKVKPHEHKRSRRYTNSTSQITAVPHYDGHQWRKYGQKNINNSNHQRSYYRCSYKHEQNCKATKTVQQLDSAGETIMYTVVYYGQHTCKTNMSNAPLHVVETSTTQSISTTCCSDDLGDYSQKMENMHTPELAEVCSDELGSYHAIIGAEHSALGLEDEHMHKLLDTFACGALDLDSWEIDAIVRSGFC

SEQ ID NO: 295 - protein, 272 aa, Fragaria x ananassa
AQKLEQLEEFMGTVQQDGLSQLASDTVHYNPSDLSTWLESMISEITPPPNFEPVMAPPPPLGSSVMMNDSFLAPAESSTITTLDFADQSMNTKSKSVSPRTQFEDCSSSSNYELKAIPGKAIFSQQTQFGSSPREPKRLKPSPDFYSTTSSSSLPLPSAVESTRPVVVVDSQENGVRLVHGLMACAEAVQQNNLNLAKALVTQISYLAISQAGAMRKVATFFAEALAQRIFRVYPAAPIDHSYSEMLQMHFYETCPYLKFAHFTANQASRSL

SEQ ID NO: 296 - protein, 504 aa, Cissus discolor
  misc_feature (235)..(259): Xaa can be any naturally occurring amino acid
SDMAEVAQKLEQLEEVIVNAQGDGLTYLASETVHYNPSDLSNWLGNMLSESNANFTPNCSLDNPFLPPISPLDYTNCSTQPKQEPSIFDSPSLDYDLKAIPGKALYPHIEQPPPPPPPPPQPAPAPIYGRESKRLKPTTSAATTANPVSSVVGGWAVPAEAARPVVLVDSQETGIRLVHTLMACAEAVQQENLKLAEALVKQIKLLAVSQAGAMGKVAFYFAQGLAGRIYGLYPXXXXXXXXXXXXXXXXXXXXXXXXXAHFTANQAILEAFEGKKRVHVIDFSMKQGMQWPALMQALALRTGGPPSFRLTGIGPPSTDNTDHLQEVGLKLAQFAETIHVEFKYRGLVANSLADLGASMLDLREDESVAVNSVFELHSLLARPGGIEKVLSTVKDMKPDIVTIVEQEANHNGPVFLDRFTESLHYYSTLFDSLEGCAVSPVSAQDKLMSEEYLGQQICNVVACEGAERVERHETLTQWRARLGSAGFDPVNLGSNAFKQASMLL

SEQ ID NO: 297 - protein, 242 aa, Zea mays
SKTRSHHPSAPLLPPSSVSLPPRPNPTIPTARLRHGSLPPPQQLLLQSLPPAPLPVAAALSPAAPAPAAALRLRRLQREPRAGAPPAVVPRRDDAADVDDDEEDEDEEAAAGDEEAGGGLPAAADAGGRAGAKKRRRKQARAAAARAAAGQGEVEAMLREFMRRQAEMEERWAEAAEAREAERRAREEEWRAAMVALGEERLALVRRWREREDALRARAEEREERRHQLVAALLAKLGGADC

SEQ ID NO: 298 - protein, 318 aa, Arabidopsis thaliana
MGAPKQKWTQEEESALKSGVIKHGPGKWRTILKDPEFSGVLYLRSNVDLKDKWRNMSVMANGWGSREKSRLAVKRTFSLPKQEENSLALTNSLQSDEENVDATSGLQVSSNPPPRRPNVRLDSLIMEAIATLKEPGGCNKTTIGAYIEDQYHAPPDFKRLLSTKLKYLTSCGKLVKVKRKYRIPNSTPLSSHRRKGLGVFGGKQRTSSLPSPKTDIDEVNFQTRSQIDTEIARMKSMNVHEAAAVAAQAVAEAEAAMAEAEEAAKEAEAAEAEAEAAQAFAEEASKTLKGRNICKMVKKRKKHPYSFISQDIISMREL

SEQ ID NO: 299 - protein, 237 aa, Malus x domestica
MGRGKIEIKLIENQTNRQVTYSKRRNGIFKKAQELTVLCDAKVSLIMLSNTSKMHEYISPTTTTKSMYDDYQKTMGIDLWRTHYESMKDTLWKLKEINNKLRREIRQRLGHDLNGLSYDDLRSLEDKMQSSLDAIRERKYHVIKTQTETTKKKVKNLEERRGNMLHGYEAASENPQYCYVDNEGDYESALVLANGANNLYTFQLHRNSDQLHHPNLHHHRGSSLGSSITHLHDLRLA

SEQ ID NO: 300 - protein, 228 aa, Tulipa gesneriana
MGRGKIEIKKIENSTNRQVTYSKRRSGIMKKANELTVLCDAEVSLLMFSSTHKLSEFCSESTNQKKIFDRYQQMTGINLWSAQYEKMQNTFNHLSQINRNLRREIKQRMGEELDGLDFSELRGLEQNLEEALKIVRGRKYHVIGTQTETYKKKVKNSEETNKNLLRDLVNIEMKDEHQVYGYIDDDPNSYEGGLALANGGSSMYEFRVQPSQPNLHGMGYGLHDLRLA

SEQ ID NO: 301 - protein, 258 aa, Cissus hastata
HFYETCPYLKFAHFTANQAILEAFEGKKRVHVIDFSMKQGMQWPALMQALALRPGGPPSFRLTGIGPPSTDNTDHLREVGLKLAQFAETIHVEFKYRGLVANSLADLDASMLDLREDESVAVNSVFELHSLLARPGGIEKVLSTVKDMKPDIVTIVEQEANHNGPVFLDRFTESLHYYSTLFDSLEGCAVSPVSAQDKLMSEEYLGQQICNVVACEGPERVERHETLTQWRARLGSAGFDPVNLGSNAFKQASMLLAL

SEQ ID NO: 302 - protein, 250 aa, Salix discolor
MGRGRVQLKRIENKINRQVTFSKRRTGLLKKAHEISVLCDAEVALIVFSHKGKLFEYSTDDCMEKILERYERYSYEERQLATTDFDSQGNWTLEYNRLKAKVELLQRNHRNYLGEDLDSMSLKELQNLEQQIDTALKHIRARKNHLMSQSISELQRKEKAIQVQNNMLVKQIKEKEKKDKAVAQPAPIWDDQQNQGPHASSFLLSQPAGLPLPCLNIGGCYQEEAPEVRRNELDHALEPTYSFHLGGYGA

SEQ ID NO: 303 - protein, 214 aa, Brassica rapa subsp. pekinensis
MTSVSAFSETLGSEYESPTLSGEYCPTLAASCPKKPAGRKKFRETRHPIYRGVRLRNSGKWVCEVREPNKKSRIWLGTFLTAEIAARAHDVAAIALRGKSACLNFADSAWRLRIPETTCPKDIQKAAAEAAVAFQAEINDTTKDHGLDVEETIVEAIFTEEDSDGFYMDEEESMFGMPTLLASMAEGMLLPPPSVQFEYNYDFDGDTDISLWSY

SEQ ID NO: 304 - protein, 231 aa, Tulipa gesneriana
MGRGKIEIKKIENSTNRQVTYSKRRSGIMKKANELTVLCDAEVSLIMFSSTKKLSEFCSESTNQKKIFDRYQQMTGINLWSAQYERMQNTFNHLSQINRNLRREIKQRMGEQLDGLDSNELRGLEQNLEAALKLVRGRKYHVLGTQIETFKKKVKNSAETNNNLLRDLVDIEMKNEHHVYGYVDDNPNSYEGGLALANGGSSMYEFRIQPSQPNLHGMGYGLHDLCLSRNP

SEQ ID NO: 305 - protein, 257 aa, Brassica rapa subsp. pekinensis
MNSVSTLSEVLGSQNESPVGGDYCPMLAASCPKKPAGRKKFRETRHPIYRGVRLRKSGKWVCEVREPNKKSRIWLGTFKTAEIAARAHDVAALALRGRGACLNFADSAWRLRIPETTCAKDIQKAAAEAALAFEAEKSDTTTNDRGMNMEETSAVASPAELNDTTADHGLDMEETMVEAVFRDEQREGFYMAEETTVEGVVPEEQMSKGFYMDEEWTFEMPRLLADMAEGMLLPPPSVQWGHNDDFEGDVDMNLWSY

SEQ ID NO: 306 - protein, 229 aa, Cucumis sativus
MGRGKIEIKRIENTTNRQVTFCKRRNGLLKKAYELSVLCDAEVALIVFSSRGRLYEYSNNSIKTTIERYKKACSDSSATSSVTELNTQYYQQESAKLRQQIQMLQNSNSNLVRHLMGDSLSALTVKELKQLENRLERGITRIRSKKHEMLLAEIEYLQKREIELENENVCIRTKIAEVERVQQANMVSGQELNAIQALANSRNFFSPNIMEPAGPVSYSHQDKKMLHLG

SEQ ID NO: 307 - protein, 97 aa, Mirabilis jalapa
KSYQDLSDALGKMFSSFTLGNYGSQGMIDFMNESKLMDLINGSDYVPTYEDKDGDWMLVGDVPWEMFVESCKRLRIMKGKEAAGLAPRAMEKCKNRI

SEQ ID NO: 308 - protein, 311 aa, Oryza sativa (japonica cultivar-group)
MDRSSQYCYTSNHEQLKMTSNNSTNEELGGGGRKAADKPSGGCGAAAAVASSRHWSASTESRIVRVSRVFGGKDRHSKVRTVKGLRNRRVRLSVPTAIQLYDLQDRLGLSQPSKVVDWLINAAQAEIDKLPPLQFPPHDHDLVAAAASSMAPPPFANGGDGHHGASASSMLEDGDKAAGGGGMKAFMSLSNSLGLLNAATMPATLAAHHHHHHHAAAYYAAAESWGNGGNGGHHHDVSHGVSPSAHNSPFPSLLSLAPGSHHQFVFYSPEGGGFAVKEAAAEQFPVDSLDHSQGQLTLSSARSFLHSGSQG

SEQ ID NO: 309 - protein, 93 aa, Mirabilis jalapa
VKVSMDGAPYLRKIDLKVYQSYAELLRGLENMFKVRIGSYSERDGYNGSDYVPTYEDKDGDWMLVGDVPWEMFISSCKRLRIMKSSEAKGLGS

SEQ ID NO: 310 - protein, 279 aa, Oryza meridionalis
QPSPPSSPMSERPPSGRSRRRAQEPGRFLGVRRRPWGRYAAEIRDPTTKERHWLGTFDTAQEAALAYDRAALSMKGAQARTNFVYTHAAYNYPPFLAPFHAPPYAAAAAAPSSVQYGGVGAAPHIGSYGHHHHHHHHHGHGAAASGASSMGECSTMPVMVPVDPHRSSMSSSLLDMDRNDHDFLFSSADDNSGYLSSVVPESCLRPRGGGAAADHQDMRRYSDADAYGMMGLREDVDDLAQMVAGFWGGGDAADQLGACGFPASGGGADMVASSQGSDS

SEQ ID NO: 311 - protein, 296 aa, Arabidopsis thaliana
SLIGFWWNTYMYVFDPTTEAGLRLEMAFPQHGFMFQQLHEDNSQDQLPSCPPHLFNGGGNYMMNRSMSLMNVQEDHNQTLDEENLSDDGAHTMLGEKKKRLQLEQVKALEKSFELGNKLEPERKIQLAKALGMQPRQIAIWFQNRRARWKTRQLERDYDSLKKQFESLKSDNASLLAYNKKLLAEVMALKNKECNEGNIVKREAEASWSNNGSTENSSDINLEMPRETITTHVNTIKDLFPSSIRSSAHDDDHHQNHEIVQEESLCNMFNGIDETTPAGYWAWSDPNHNHHHHQFN

SEQ ID NO: 312 - protein, 252 aa, Triticum aestivum
MGRGRIEIKRIENTTSRQVTFCKRRNGLLKKAYELSVLCDAEVALIVFSSRGRLYEYSNNSVKATIDRYKKAHACGSTSGVPLIEVNAQQYYQQEAAKLRHQIQMLQSTNKHLVGDSVGNLSLKELKQLESRLEKGIAKIRARKNELLSSEINYMVKREIELQSDNIDLRTKIAEEEQQLQQVTIARPSAALELNPFTALDMKCFFPANLFEAAVQAHAQARTQAQAQASLQLNLRYQQLAPPGAGDVAHQF

SEQ ID NO: 313 - protein, 279 aa, Oryza longistaminata
QPSPPSSPMSERPPSGRSRRRAQEPGRFLGVRRRPWGRYAAEIRDPTTKERHWLGTFDTAQEAALAYDRAALSMKGAQARTNFVYTHAAYNYPPFLAPFHAPPYAAAAAAPSSVQYGGGVGAAPHIGSYGHHHHHHHHHGHGAASGASSVGECSTMPVMVPVDPHRSSMSSSLLDMDRNGHDFLFSGADDNSGYLSSVVPESCLRPRGGGAAADHQDMRRYSDADAYGMMGLREDVDDLAQMVAGFWGGGDAADQLGACGFPASGGAADMVASSQGSDS

SEQ ID NO: 314 - protein, 445 aa, Candida albicans SC5314
MDSRTKLFHCDVCSSDCTNRIRIQCAICTDYDLCVPCFAAGLTTGDHKPWHDYQIIEQNTYPIFDRDWGADEELLLIQGCETSGLGNWADIADHIGNRSKEEVAEHYFKIYLESKDYPLPEMNKDFTDVSPLQFLEERKERLEKRKNIPLPPPRGKPVASVPLCHEIQGYMPGRLEFDHEAENEAEIPIKDMVFDPEDSANDIDLKLTILDIYNSRLTTRAERKRVMILNHLLDYRKNIGSDKRKSKEEKDLLKKINAFIRILTPEDFESFSRDLLTELKCRMKIQQLQTWRRNGITTLEDGAKFEKDKVIRAAHYQRMGNGTGSGRHSQTPGLTSGNSFNGNGHRNKFSPQPEFRSKSTTARAPLDISHAADFELLSAEEKQLCATLRILPKPYLAIKNQLMREAVKNNGVLKKKDARQALKIDVNKASKIYEFFVHMGWCSQG

SEQ ID NO: 315 - protein, 219 aa, Nicotiana tabacum
MVRGKTQMRRIENATSRQVTFSKRRNGLLKKAFELSVLCDAEVGLVIFSPRGKLYEFASSSMQEIIERYKRHTKDKVQPENQVGEQNLQHMQHAAASLMKKIELLEESKRKLLGEGLQSCSLVELQQIEKQLERSVSTIRARKIQVFKEQIERLKEKEKILASENAILREKFGGLQQRQGSSGEKEGEALCTESSEKSDVETELFIGPPECRIRRPLQN

SEQ ID NO: 316 - protein, 279 aa, Oryza glumipatula
QPSPPSSPMSERPPSGRSRRRAQEPGRFLGVRRRPWGRYAAEIRDPTTKERHWLGTFDTAQEAALAYDRAALSMKGAQARTNFVYTHAAYNYPPFLAPFHAPQYAAAAAAPSSVQYGGGVGAAPHIGSYGHHHHHHHHHGHGAASGASSVGECSTMPVMVPVDPHRSSMSSSLLDMDRNGHDFLFSGADDNSGYLSSVVPESCLRPRGGGAAADHQDMRRYSDADAYGMMGLREDVDDLAQMVAGFWGGGDAADQLGACGFPASGGAADMVASSQGSDS

SEQ ID NO: 317 - protein, 368 aa, Solanum tuberosum
NSSTYTQFVASRRMGICEPIHQMGMWDDFNASCPSTSATMILEVEKCLEDQIPNMIETEDTSHGTVGTSNRYEAETSKPIEKVLRRLAQNREAARKSRLRKKAYVQQLENSKLKLIQLEQELDRARKQGLYVGAGLDASQLSYSVTASSGTAVFDTEYGQWVEEQNRQTNDLRNALHHSQISEAELRIIVDGCLNHYFELFRVKATAAKADVLYIMSGMWKTSAERFFMWIGGFRPSELLKVLTPHLELLTEQQLREVCNLRQSCQQAEDALSQGMVKLHQILGEAVAAGRLGEGNYSLPQMGPAIEKLEALVRFVNQADHLRQETLQQMSRILNTHQAAQGLLALGEYFEQLRVLSSHWATRLHEPA

SEQ ID NO: 318 - protein, 368 aa, Solanum tuberosum
STYTQFVASKRMGICDPIHQIGMWGDFKGSSFPDTLILEVENCLENEMPIMEKRLENEIEEPSQVTVGMSNRYEPETTKRIDKVRRRLAQNREAARKSRLRKKAYVQQLENSKLKLLQLEQELERNRQQGLYVGDGLDASQIGCSGTANSGIASFEMEYGHWVEEQDRQTDDLRNALHNSQMGEIELRILVESCLNHYFDLFRLKATAANADVLYLMSGTWKTSAERFFLWIGGFRPSELLKVLTPHVEPLSDQQIQEVSNLTQSCQQAEDALSQGMVKLHQILAEAVAAGTLGEGIILPQMTATIEKLEALVRFVNQADHLRQETLLQMSCILAAHQSAQGLLALGEYFKRLRALSSLWAGRLSEPA

SEQ ID NO: 319 - protein, 166 aa, Sorghum bicolor
MGRIPCCEKDSVKRGPWTPEEDNKLLSYITQYGTRNWRLIPKNAGLQRCGKSCRLRWTNYLRPDLKHGEFTDAEEQTIIKLHSVVGNRWSVIAAQLPGRTDNDVKNHWNTKLKKKLFGMGIDPVTHKFFSHLMAEIRHHAGAAAGGAPRRGPRLVCFKGRNAPPSS

SEQ ID NO: 320 - protein, 150 aa, Zea mays subsp. parviglumis
MDWDLKAAGAWDLAELEQDHAAAAPSSGGHAANAAAAGTGTESRPPAPGAAGAPAVCSVDLKLGGMGECEAGAARREREAAAGAAKRPRPAGPGGQQQQQCPSCAVDGCRADLGKCRDYHRRHKVCEAHSKTPVVVVAGREMRFCQQCSR

SEQ ID NO: 321 - protein, 311 aa, Oryza sativa (japonica cultivar-group)
MGGGGGVEADCDRIRGPWSPEEDEALRRLVERHGARNWTAIGREIPGRSGKSCRLRWCNQLSPQVERRPFTAEEDATILRAHARLGNRWAAIARLLQGRTDNAVKNHWNCSLKRKLAVATTTTTTTTGAAAAPGVVADAAELVERPCKRFSPTPDSPSGSGSGSDRSDLSHGGGFGQIFRPVARTGAFEPVDCAISRRQEEDPFTSLSLSLPGTDQRFNHDSAHSHFQELPSSPSPPPPPPPAAAASTTQYPFTPEFAAAMQEMIRAEVHKYMASVGVRAGCGDAGGADLHMPQLVEGVMRAAAERVGRMH

SEQ ID NO: 322 - protein, 573 aa, Oryza sativa (japonica cultivar-group)
MDSDAEMPMSSDEEMLDDEDYYDYSDDMGEDDDGSGGGGGGDSDGEEEEEGDEELVGGDYEGREAEGSDEVVSRREQRYIVLTEKDINERQEEDIGKVSAVLSIRREEACVLLHHYKWNISKLSDEWFADEEKVRDIVGLLLNGIDLPNSRKLTCGICFEGYSSDVMSSADCDHFYCHECWEGYISAAISDGPGCLSLRCPDPSCGAMVLQNMINKLAKDDDKVRYARFILRAYVEDSKKCTEEAHRPVNCETVSRWILKNSAESENMNWILANSKPCPKCKRPIEKNQGCMHMTCTPPCKFEFCWLCLGSWAEHGERTGGFYACNRYESAKKEGVYDETEARRERAKNSLERYMHYYERWASNQTSRQKAQADLQKAEKEQLAKLTDVFGIPETQLKFIIEAWSQIIECRRVLKWTYAYGYYLDDKVKSEFFEYLQGEAESGLERLHQCAEKDLQSFLTVRSDNTEPAPSIAEFGDFRVKLAGLTSVTRNYFENLVQALEAGLEDVHSTAQGTTSSNATNIPSKKAVTKGKTKKQLPRTSSDNSDEGWPCERCTFINPSSVDACSVCDKHRY

SEQ ID NO: 323 - protein, 385 aa, Trifolium pratense
MCGGAIISDFIPAAAAVGGSRRVTADILWPNLRKTGSKKSSFLLDDDFEAGFRQFKDDSDFDEDEDEDDDEGLLVGVKGFTFAASNNKSSRNFSRGSAGAKSVASKSNEQAEKESKRKRKNQYRGIRQRPWGKWAAEIRDPRKGVRVWLGTFNTAEEAARAYDAEARRIRGKKAKVNFPDEAPNASSKRLKTNPDNQLLNKNLNSFKPNGNNKMFNFSENMENFYSPMDQVEQKPLVNNQYGAADIGAFTGNGVHLAPADVNAYFSSEHSSNSFDYSDLCWGEQGPKTPEISSVFSAPLEAEPQMNMQSNNSQDMLPMQAESAKTLSEELADIESQLKFFENSFDDNWSDASLASLLGADVTQDAGNTMNLWSFDDLPSIAGGVF

SEQ ID NO: 324 - protein, 410 aa, Oryza sativa (indica cultivar-group)
MPPPLSFLHLAANPTPLHASPLRRARLRHCLSLRTDHPSRRAVASASASAGENPSTPGGPIADVEMVRGKDGVWTARPPTVVVLWDLDNKPPRGPPFPAATALRDAASLLGRVVSVSAFANRHAFSHVPAWVADERRERRAMDRAERAGAASPPVPYSCAVCGRRFPTRPDLTRHFRQLHQRERNKKLSRLRSLKGKKRQKFRERFISGNTKYDDAARELLTPKVGYGLAAELRRAGVHVRTVSDKPQAADHALKRQVKHSVACGVDWLVLVSDDSDFTDTVRKARAADLRTVVVGDGCRALGSVADIWLPWDRVENGEVDEDMLRNGTHMGFRDEEEDEQDDDEFIVDWDTSDLDGVVDDIVATRTKLFGATTMSAFADEEIMDGILGVGINGGDMLWSSDDEDEDGYF

SEQ ID NO: 325 - protein, 266 aa, Triticum aestivum
  misc_feature (166)..(166): Xaa can be any naturally occurring amino acid
MEGGGMDQVCMAAMTNQPPVSDNKPMKNISGEMPATATANAGSGSFDCNICLDFAADPVVTLCGHLYCWPCIYEWLRPSVVSASGANSTSARQQCPVCKAALSADSLVPLYGRGGSSKKSLDGTAIPRRPTVHRENVAHQHAQSSMDDDRHHHNVEPSPPLRSLRXHAHHHHPGATEFDFVYPPSPMGRGLIHSTAGGVLGGMAEVVLPWAFRGQVPPSMYYTSPYAVADHTVGPRLRRQQMEVERSLHQIWFFLFVFVVLCLLLF

SEQ ID NO: 326 - protein, 387 aa, Zea mays
MLAGAPTGDAGPSSGAGSNPPTRPRRFPGAAQPEIMRAAEKDDSYAAHVTEACRDAFRHLFGTRVAVAYQNEIKLLGQSLYYLLTTGSGQQTLGEEYCDISQVATLHGLPPTPARRILFILYQTTVPYLAERISSRIVARSIVLNESQFDDHPESDNSSSDIAQSTTNSDIPSRSLSVSALSGFRGRVHALWQWVLQKWPSMLPYAQDFIQLAIRTNLMFFYFEGLYYHLPKRAAGIRYVFIGKPMNQRPRYQILGIFLLIQLCILGAERLRRSNISSIASSINQISSGGYPSTTGRGIPVLNEDGNIISDIRSGKAADIASHSETSNGKSKCTLCLSIRQNPTATTCGHVFCWNCIMEWCNEKPECPLCRTPITHSSLICIYHSDF

SEQ ID NO: 327 - protein, 372 aa, Nicotiana sp.
MNSTYTQFVASKRMGICDPIHQIGMWGDFKNSSFPDTSATLILEVENCLENEMPIMEKRPHNETEELSHGTVGTSNRYEPEARKPIDKVLRRLAQNREAARKSRLRKKAYVQQLENSKLKLLQLEQELERTRQQGQYAGVGLDESQIGYTGTANSGIVAFEMEYGHWVEEQDRQTDELRSALNSQVGEIELQLLVEGCLNHYFDLFRMKAAAAHADVLFLMTGTWKTSAERFFLWIAGFRPSELLKVLTPNVEPLTEQQLRDVCNLMQSCQQAEDALSQGMVKLHQILAEAVAAGTLGDGIILPKMAATIENLEALVRFVNQADHLRKETLLQMSCILTPQQSAQGLLALGEYFKRLRALSSLWTSRTSEPA

SEQ ID NO: 328 - protein, 256 aa, Glycine max
MGNQKQKWTQDEEDALIAGVEKHGPGKWKNILKDPQFAPFLTSRSNIDLKDKWRNLSVSNGAQGSKEKSRVPKPKAFSAPPATTATTATPQNASPAPQSASSDAAVAPDASQNDQDAKNPPRYNPSRPEALSALKDSNGSDMNAIIKFMEVQNGYKVKKEASSGTKSPSPKPKDVRPPQPQQQSPASVLMTNDTIKEAADTAAYRVADAESKSYLAAEAVKEAEKISLLVEHSDSMLQLAKDIYEQCSRGEIILLA

SEQ ID NO: 329 - protein, 308 aa, Arabidopsis thaliana
MNWLPEAEAEEHLKGILSGDFFDGLTNHLDCPLEDIDSTNGEGDWVARFQDLEPPPLDMFPALPSDLTSCPKGAARVRIPNNMIPALKQSCSSEALSGINSTPHQSSAPPDIKVSYLFQSLTPVSVLENSYGSLSTQNSGSQRLAFPVKGMRSKRRRPTTVRLSYLFPFEPRKSTPGESVTEGYYSSEQHAKKKRKIHLITHTESSTLESSKSDGIVRICTHCETITTPQWRQGPSGPKTLCNACGVRFKSGRLVPEYRPASSPTFIPSVHSNSHRKIIEMRKKDDEFDTSMIRSDIQKVKQGRKKMV

SEQ ID NO: 330 - protein, 288 aa, Zea mays
MGAPKQKWTSEEEDALRAGVRKHGAGKWRTIQKDPEFSPVLSSRSNIDLKDKWRNLSFSASGLGSSKLRVPKITGPSSSPSSSSQPLLLPAANKFTEATLPADAEKKPQDGKTLPKYGAMIMEALLELNEPNGSDIAAIFGFIEQRYAVQPTFRRFLASKLRRLADSNKIEKIDKSYRIPDSLATRTPAPMNASAPKQKDPSKPSKVSKAIGLFSASSPALEAAMAAAVKVADAEAKAHDAHDQTMEAERIFKMAEDTESLLIIAAEIYDRCSRGEITTLVPVAQREI

SEQ ID NO: 331 - protein, 53 aa, Pisum sativum
  misc_feature (46)..(46): Xaa can be any naturally occurring amino acid
RPSYLYRGCIMYLPSSFAENNLNEVSGFIKLLGPTGKEFPVRCLYXGGRAKLS

SEQ ID NO: 332 - protein, 651 aa, Oryza sativa (japonica cultivar-group)
MKREYQEAGGSSGGGSSADMGSCKDKVMAGAAGEEEDVDELLAALGYKVRSSDMADVAQKLEQLEMAMGMGGVSAPGAADDGFVSHLATDTVHYNPSDLSSWVESMLSELNAPLPPIPPAPPAARHASTSSTVTGGGGSGFFELPAAADSSSSTYALRPISLPVVATADPSAADSARDTKRMRTGGGSTSSSSSSSSSLGGGASRGSVVEAAPPATQGAAAANAPAVPVVVVDTQEAGIRLVHALLACAEAVQQENFAAAEALVKQIPTLAASQGGAMRKVAAYFGEALARRVYRFRPADSTLLDAAFADLLHAHFYESCPYLKFAHFTANQAILEAFAGCHRVHVVDFGIKQGMQWPALLQALALRPGGPPSFRLTGVGPPQPDETDALQQVGWKLAQFAHTIRVDFQYRGLVAATLADLEPFMLQPEGEADANEEPEVIAVNSVFELHRLLAQPGALEKVLGTVHAVRPRIVTVVEQEANHNSGSFLDRFTESLHYYSTMFDSLEGGSSGQAELSPPAAGGGGGTDQVMSEVYLGRQICNVVACEGAERTERHETLGQWRNRLGRAGFEPVHLGSNAYKQASTLLALFAGGDGYRVEEKEGCLTLGWHTRPLIATSAWRVAAALIAKFLGRCTTCFPPITAQPPHKDGT

SEQ ID NO: 333 - protein, 50 aa, Pisum sativum
LRPSYLYRGCIMYLPSCFAEKNLNGVSGIIKLQISDGRQWPVRCLLEEAE

SEQ ID NO: 334 - protein, 276 aa, Zea mays
MMAEAWTPVPFPPTAPCFWLHDAHSVFWRGGDAWTAAENKLFEKALAQIDRNAPDRWEKVAEVVRTKTVDDVRNHYHDLENDVGFIEAGLVPFPHYSGSVPSFGFTHHEDWDGGFRRGYCLKRARGSDPERKKGVPWTEEEHKLFLMGLKKYGRGDWRNISRKYVTTRTPTQVASHAQKYFIRLNSGGKDKRRSSIHDITTVNLPDEDRGNAPPSAVTTTTNPSVALVDMKPFVAPLQDALGVPHPYGDVKLEPKSSLVAGLGFNDSVLLMHCGQL

SEQ ID NO: 335 - protein, 150 aa, Zea mays subsp. parviglumis
MDWDLKAAGAWDLAELEQDHAAAAPSSGGHASNAAAAGTGTESRPPAPGAAGAPAECSVDLKLGGMGECEPGAARREREAAAGAAKRPRPAGPGGQQQQQCPSCAVDGCRADLGKCRDYHRRHKVCEAHSKTPVVVVAGREMRFCQQCSR

SEQ ID NO: 336 - protein, 173 aa, Zea mays
  misc_feature (109)..(109): Xaa can be any naturally occurring amino acid
MSLGALACRKVIRFKQQLKLHSRKVMQQEGTPMPAVMDPQAENFDALVTAKISMDASLAGGIMGKGRVNTKQTSRVTCVKLSIRNHESNPKLKNIELEGNFNQINQTNXLRDLIMTISASMLAKNPYVVARASGRARRRPWGRSSNYKTKLCEIFVKGACTSGDRCHFAHGEN

SEQ ID NO: 337 - protein, 184 aa, Sorghum bicolor
MGRQPCCDKVGLKKGPWTAEEDQKLVTFLLANGHCCWRAVPKLAGLLRCGKSCRLRWTNYLRPDVKRGLLSSEEERTVIDLHEQLGNRWSKIASQLPGRTDNEIKNHWNTHIKKKLRKMGIYPVTHKPLHQPASPPPLTRQEQDTGGGSPEKEEKEKEKLLWQATPSVWARDVLRRRGAHGAPS

SEQ ID NO: 338 - protein, 150 aa, Zea mays subsp. parviglumis
MDWDLKAAGAWDLAELEQDHAAAAPSSGGHAANAAAAGTGTESRPPAPGAAGAPAECSVDLKLGGMGECDPGAARREREAAAGAAKRPRPAGPGGQQQQQCPSCAVDGCRADLGKCRDYHRRHKVCEAHSKTPVVVVAGREMRFCQQCSR

SEQ ID NO: 339 - protein, 294 aa, Cucumis sativus
MGRPPCCEKVGIKKGPWTPEEDIILVSYIQQHGPGNWRSVPTNTGLLRCSKSCRLRWTNYLRPGIKRGNFTPHEEGMIIHLQALLGNKWAAIASYLPQRTDNDIKNYWNTHLKKKLKKLNSAAVDTPEPPESATTRFQSNDKVPTADSPSSLVSNRATTYASSAENISRLLQAWMRSSPEESRRKMSGENSIAAATQQQQQPKAEPDGGELVSGEEFDSILSFENMKSVNSWGKSSLSYKGKEEVNVGEKQSSENDDATAENATAPPLSFLEKWLFEEGAAGQVEEMMELSPVF

SEQ ID NO: 340 - protein, 162 aa, Sorghum bicolor
MGRQPCCAKVGLKRGPWTVEEDQKLVTFLLTNGHCCWRAVPKLAGLLRCGKSCRLRWTNYLRPDVKRGLLSSEEERTVIDLHEQLGNRWSKIASQLPGRTDNEIKNHWNTHIKKKLRKMGIDPVTHKPLHQPASPPPPPPLTRQEQEEKDTRGSPKKKRRRR

SEQ ID NO: 341 - protein, 150 aa, Zea mays subsp. parviglumis
MDWDLKAAGAWDLAELEQDHAAAAPSSGGHAANAAAAGTGTESRPPAPGAAGAPAECSVDLNLGGMGECEPGAARREREAAAGAAKRPRPAGPGGQQQQQCPSCAVDGCRADLGKCRDYHRRHKVCEAHSKTPVVVVAGREMRFCQQCSR

SEQ ID NO: 342 - protein, 204 aa, Sorghum bicolor
MGRQPCCDKVGLKKGPWTAEEDQKLVTFLLANGHCCWRAVPKLAGLLRCGKSCRLRWTNYLRPDVKRGLLSSEEERTVIDLHEQLGNRWSKIASQLPGRTDNEIKNHWNTHIKKKLRKMGIYPVTHKPLHQARFPPPLTRQEQDTGGGSPEKEEKEKEKAVVAIPQTWAQDVCADKVLWTPLYTSSCTAGDHYSGLPTTPRLFS

SEQ ID NO: 343 - protein, 354 aa, Nicotiana attenuata
MQSLKNNAQSNGGNQYNNQSSQSIREQKRSEDGYNWRKYGQKQVKGSENPRSYYKCTFPNCPTKKKVERSLDGQITEIVYKGNHNHPKPQSTRRSSSTASSSSAVQPYNTQTNEIPDHQSYGSNATPENSSISFGDDDHEHSSQKSRSRGDDFDEEEEEPDSKRWKRESESESLSAPGSRTVREPRVVVQTTSDIDILDDGYRWRKYGQKVVKGNPNPRSYYKCTSPGCPVRKHVERASQDIRSVITTYEGKHNHDVPAARGSGINRPVAPSITYNNGANAVRPFVTSQIPLQSIRPHQSPFTLEMLQKPSNYNGFSGYANSEDSYENQLQDNNVFSRAKDEPRDDMFMDTLLC

SEQ ID NO: 344 - protein, 293 aa, Zea mays
MSGAGPDLQLPPGFRFHPTDEELVMHYLCRRCAGLPIAVPIIAEIDLYKFDPWQLPRMALYGEKEWYFFSPRDRKYPNGSRPNRAAGAGYWKATGADKPVGTPKPLAIKKALVFYAGKAPKGEKTNWIMHEYRLADVDRSARKKNSLRLDDWVLCRIYNKKGGGLEKAPAAGGDHKPVFATAAVSSPPEQKPFVAAAGGLPPAFPELAAYYDRPSDSMPRLHADYSSCSEQVLSPEQLACDREVQSQPKISEWERTFASDPVNPAGSMLDPVLGHAGGDPLLQDILIYWGKPF

SEQ ID NO: 345 - protein, 213 aa, Oryza sativa (indica cultivar-group)
MSDRDVDMHILTALMADMADSSSSSSSSSSSDDSDMRASAAAAEPEHRRSPAPPPPPRQQQLIGVRKRPWGKFAAEIRDSTRKGARVWLGTFDSPEAAAMAYDQAAFSVRGASAVLNFPLHRVQESLQALALGAAGGSPVLALKRRHSIRKRRKPTKHMLLMQQQQQEPTVVELEDLGADYLEELLRLSESSSSSSSSSISNFTTTPNRHCQC

SEQ ID NO: 346 - protein, 502 aa, Cissus repens
EVAQKLEQLEEVIVNAQGDGLSYLASETVHYNPSDLSNWLGNMLSESNANFTPNCSLDNPFLPPISPLDYTNCSTQPKQEPSIFDSPSLDYDLKAIPGKALYPHIEQPPPPPPPPPPPAPAPIYGRESKRLKPTTSAATTANPVSSVVGGWAVPAEAARPVVLVDSQETGIRLVHTLMACAEAVQQENLKLAEALVKQIKLLAVSQAGAMGKVAFYFAQGLAGRIYGLYPDKPLDTSFSDMLQMHFYETCPYLKFAHFTANQAILEAFEGKKRVHVIDFSMKQGMQWPALMQALALRTGGPPSFRLTGIGPPSTDNTDHLREVGLKLAQFAETIHVEFKYRGLVANSLADLDASMLDLREDESVAVNSVFELHSLLARPGGIEKVLSTVKDMKPDIVTIVEQEANHNGPVFLDRFTESLHYYSTLFDSLEGCAVSPVSAEDKLMSEEYLGQQICNVVACEGAERVERHETLTQWRARLGSAGFDPVNLGSNAFKQASMLLAL

SEQ ID NO: 347 - protein, 218 aa, Medicago truncatula
MVTKTKNAANLKIKKPSNNNNNATEIHFRGVRKRPWGRYAAEIRDPGKKSRVWLGTFDTAEEAARAYDNAARQFRGPKAKTNFPPPPSDVKEDSPSQSSTVESSVPAPDREVTRREVPTGGSVMDRFPFLSIQQQIMPFAGAGAGAVDGMVPVFFYDPAGRAEFLNQRFTNRFEPEPVQFNIGFGGGVQSDSDSSSVVDCQPKRALNLDLNLAPPMEY

SEQ ID NO: 348 - protein, 304 aa, Zea mays
LTSSFSSLSGSLPEERHYCHTTTPPMLNMMTDLSCGPSSKAAKGGQPAATTGSGGDRQGRGKIEIKRIENTTNRQVTFCKRRNGLLKKAYELSVLCDAEVALVVFSSRGRLYEYANNSVKSTIERYKKANSDTSNSGTVAEVNAQHYQQESSKLRQAIDSLQNANRTIVGDSIHTMGLRELKQMEGKLEKAINKIRARKNELLYAEVEYMQKREMDLQTDNMYLRSKIAENNETGQPPMNMIGLPSTSEYDHMAPFVDSRNFLQVNMQQQPQHYSHLSAATNDPPTRMMKLRIFGQQSMHASTQ

SEQ ID NO: 349 - protein, 373 aa, Aspergillus nidulans FGSC A4
MADQDLSLSTTAPPARPSAKFYPFATSPDIIRSHEKDAFLTANLANEAQSIIRTLRGARYAHTYSEAIKHLTELLYFSLTTLTGNRTLGEEYCDLVQLEDDTLRLPSIGRRVGYILSSIMVPWTLQRILPGFRQRLRAKLERSIARQQLKAQQAKDSNKTPLKNKSKQPPFFTKLRIQKYILEHLDSITSLSPIYALSIATFYFTGSYYHLSKRFWGLRYVFTKKLEENEQRVGYEVLGVLLVLQIAVQSILHVKKVSHSLQSEDQDVHSETSGSSSKEDTLTRSIEHPASLPVLPVSTARYDLSEDPNAIPWIPDGQQRKCTLCLESFKDPSVTTCGHVFCWTCVCDWVREKPECPLCRQELLASKVLPLRG

SEQ ID NO: 350 - protein, 589 aa, Oryza sativa (japonica cultivar-group)
MDSEDDMLDANDSADDDFYSGGEAGLGGSDDGDADYDFADHDSDDSAELLSHRQQQNYSILSEADIQQRQEDDINRVSTVLSISKSEACVLLRNYNWSVSKVHDEWFADEEHVRKVVGFPEKLIEMPNDRELTCGICFENCPRTSMSAAACGHPFCSACWRGYISTSINDGPGCLMLRCPDPSCTAAVGQDMINSLADDEDREKYGRYLRRSYIEDNRKTKWCPAPGCEYAVEFVMGSGSYDVNCNCSYGFCWNCTEEAHRPVDCATVSKWILKNSAESENMNWILANSKPCPKCKRPIEKNQGCMHITCTPPCKFEFCWLCLGPWSEHGERTGGFYACNRYEAARQEGAYDESERRREMAKNSLERYTHYYERWAANQSSRQKALGDLLSLQNDKLEKLSDIQSQPESQLKFIIEAWLQIVECRRVLKWTYAYGFYLPEHEHAKRQFFEYLQGEAESGLERLHQCAEKELQVYLEAESPSKDFNDFRTKLAGLTSVTRNYFENLVRALETGLNDVGPSTSHGTCSKSATSKSLGSKSKSSKSRASSTSSKTGGSSRGVDESNIWTCDQCTYANPRSARNCQACNNQHR

SEQ ID NO: 351 - protein, 99 aa, Oryza sativa (indica cultivar-group)
MSSSWTTKQNKVFERALAIYDRDTPDRWQNVARAVGGGKSVDDVKRHYEKLIKDVDRIDSTGGHQGSHYNSSNASSSSSSSNSRGSANEDQRRRYHNFQ

SEQ ID NO: 352 - protein, 421 aa, Physcomitrella patens
MGRKPCCEKVGLRRGPWTSEEDQKLVSHITNNGLSCWRAIPKLAGLLRCGKSCRLRWTNYLRPDLKRGIFSEAEENLILDLHATLGNRWSRIAAQLPGRTDNEIKNYWNTRLKKRLRSQGLDPNTHLPLEDSKLDDTEDDTDDEGGDSSDVTMSDASKSEKRSKKKSKPKETVKVRQPKGPKPAPQLKMCQSDEGPVLLKVPKAPKSPISVNPGPGCNYDDDSEHSSSSTVTTKSHEDHRDSSDFIKALTSVSSFPEAELWSCIKPITNSFSSTALLSEWDSYRAFDSSLFPSSYPQLNSGLPKLEDVNSKSSAVASPVQGMLPAYNPMGMEMQTRMQFSSQLTHEIGQNYGGIFQETCYPQPDMGMSWSMHAELSHCGTESLFATPNPANAPSNFEEVPQPSPCTTSQELQRLAALLDLI

SEQ ID NO: 353 - protein, 302 aa, Medicago truncatula
MKRLNNTSDSFSTPLITISPSTEEHSPRNKHVYGMEFQSMMLDGFEEEGCVEETGHHSEKKRRLRVDQVKALEKNFEVENKLEPERKEKLAIELGLQPRQVAVWFQNRRARWKTKQLERDYGVLKANYDALKLKFDAIAQDNKAFHKEIKELKSKLGEEEKSTINVLVKEELTMLESCDEDKHNPSSETSNPSSESKDHLDYDCIINNNDVGIGETSSLFPVDLKDGSSDSDSSAISSSGVLQSQQHLLLSPESSSMNCFQYQKSYHVKMEEHNFLSADEACNFFSDEQAPTLQWYCPDQWS

SEQ ID NO: 354 - protein, 340 aa, Malus x domestica
MALKLCDSCKSATGTLFCRADSAFLCVNCDSKIHAANKLASRHARVWLCEVCEQAPAHVTCKADDAALCVTCDRDIHSANPLSHADERVPVTPFYDSVNSATDSVPAVKSAVNFLNDRYFSDVDGEIEARREEAEAASWLLPNPKAMENPDLNSGQYLFPEMDPYMDLDYGHVDPKLEDAQEQNSCITDGVVPEQSKNMQPQLVNDHSFEIDFSAASKPFVYGYHHAQCLRQSVSSSSMDVSIVPDDNAMTDDSNPYNKSMTSAVESSHPAVQLSSADREARVLRYREKRKNRKFEKTIRYASRKAYAETRPRIKGRFAKRTEVEIEAEPMCRYGIVPSF

SEQ ID NO: 355 - protein, 354 aa, Oryza sativa (japonica cultivar-group)
MAGSQRREARRKARRGGGRVAAHASKPPEPASKRGRAEADQALQAPPPAAPGLARDSGPVVGRGRVLAAAGGAAARRWSPGAGKEEEEEEGGMSGCRSGARRRRGRLIAARGEMERESAAVVAARRSAKTLWEAVSARLRERGYRRTAEQCKCKWKNLVNRYKGKETSDPENGRQCPFFDELHAVFTERARTMQQQLLESESGPSVKKKLKRPSGDLSSEDSDDEEDGSGDSGDEKPIRSRKRKIADKRQQSQRMAEKSRTSISSIHELLQDFLVQQQRMDIQWHEMMERRSQERIVFEQEWRQSMQKLEQERLMLEHTWMEREEQRRMREEARAEKRDALLTTLLNKVLQEDL

SEQ ID NO: 356 - protein, 329 aa, Malus x domestica
MASKLCDSCQSATATLFCRADSAFLCVNCDSKIHAANKLASRHPRVWLCEVCEQAPAHVTCKADDAALCVTCDRDIHSANPLSSRHDRVPVTPFYDSVNSAANSVPVVKSVVNFLDDRYLSDVDGETEVSREEAEAASWLLPNPKAMENPDLNSGQYLFQEMDPYLDLDYGHVDPKLEEAQEQNSCGADGVVPVQSKNMQPLLVNDQSFELDFSAGSKPFVYGYHHARCLSQSVSSSSMDISVVPDGNAVTAAVETSQPAVQLSSVDRVARVLRYREKRKNRKFEKTIRYASRKAYAETRPRIKGRFAKRTEVEIEAERMCRYGVVPSF

SEQ ID NO: 357 - protein, 423 aa, Arabidopsis thaliana
MEEQKIQEKSLAHGAAPPLTAVERFLNGQKNEALCFKKQERSIDRPIVKTTRAIEIRNENKENMMFGPRKEKNLAVIGEIVVKGAAKDYTCKDITKKQPYKNIIKGQWTADEDRKLIKLVMQHGERKWAVISEKLEGRAGKQCRERWHNHLRPDIKKDSWSEEEERLLVEAHTRIGNKWAEIAKLIQGRTENSIKNHWNATKRRQNSKRKHKRSKNADSNSDIDDLSPSAKRPRILEDYIKNIENNDKNNGENIMTTSGNNVLSTSNYDQFNSEDSTSSLLDDPYDEELVFLKNIFENHSLENINLSQGTEITQSSSSGFMIENPKPKPNLYNNTFGTHLGAMVTEPANSSHLASDIYLSDLLNGTASSSSSLTFLSSNNNEHAGENELLLPQANSTSERREMDLIEMLSGSTQGSNIWFPLF

SEQ ID NO: 358 - protein, 1413 aa, Oryza sativa (indica cultivar-group)
MPPRSRRLSPGQATEGWPRAEEPQPPIGGTPGAAGPPAPPSFFPSLELGTSAAPPALEAAAAGAGQPGSPSPCPPAEPAAEFYPGSAASSPSSSSYETAEDDSPASPPPTPPPLVLCASPDSSYTESSPTRDRFGDEEGSHAAPEPPPPPTPLEGGPDASSAEPAAMASRAREPMGSRTAPEPPTPPLESGQEGFQQQQPHPPPTTHPECDSSEPAELPLPPTSPAEIAYTSPDSVEVDVVAVSPEEAPGSRVAMEVMYGETDTSAVSVSPVLGSAETDAAEIDVIAGMQEEAPGSTVAMEVMYRENDTAAVSVSPVLESREPDVAEGDVVAGVQEAHGSKFSMEVMYRETDAAAVSVSPVLESGEPDKAENDAVEEMQEEAHGSRFAMEATYGEPDASAVSVSPVLESVEPDVTEIDVVSEIQEEAPDSTLAMEVTSGETDTAAVSAFPVLDGGDPDAAEKNVVAGMQEEEAPDSTLAIEVTSGETDTAAVSVSPVLEGVDPDAAEIDVVAGMQEEAPGSTLAMEVTYRETDATAASVSPVLDSGDPDAAEVDVVVGMQEQAAGSALAMLVTYGETDTSAVSVSPVLESGEPDAAQIDVVAGMQEEAPGSMLAMEVTYREVDAATVSVSPVLESVEPDAAKIDVVARMQEEAPGSKLAMEVMYGETGTAAVSVPLVLESREEGSLQESMQRPSSPTMNIEQESMQRPFSPTIGTETSSPEMAPAGSENCKVSWLPLPPPTPLGESMPSLPVAAAPKVLLVMLEEAVESVPSSEALDVEKPASITQAEPSSPNTPPPGFENFKSSWLPLPTTPPPVETTDVLPDVVVTKAVEAPIEEVSRPLPALEVTNMESDTVLSILPTTVLPTEGTEGLLQQPLLRPPSPVVQSEPCLQNEMAPPGFENFKSSSEPCSAEEIAPPGSDNFKSSSEPCLPEEMAPPGFENFKSSSEPCSQEEMAPPGFENFKSSWPPLPTLPQTVPDAAAADALAATVEEAAGPPPALELEAMDVDMDAIHPPPLPFGSGVESLQKPLPRAPSPIMQEAPCSPDRAPPGFETYKSSQLLLPSPSLAQTTNVRQDQSVTEPVSVIEEAPQLLHSVEVMGVHMDAVPPLLPSSESGADGLSPQQFAQPPPAEKDTTTCLPDMVHSGCDNSEPSQLLSLPAVISPVQTPDGLADVPAIDRVAVALEESPQRPLVSGEMEASTVPIRSSPLKNISEGSLPQLESESHSPTSQAADSLLDASDSKSVAVASEEMSQLPLASQATTTDLVSTTAMQPQSEGIVDESLQPQHPPSSTAHDSPCLQDSVPLVPPPPSPYLNKEVGQMVCGSCRILLAYFRGAGYVHCTCCQTMNYVLEAHEVGKVHCGHCATLLMYPFGAPAVKCSLCLFVTEIGERNVRRRLSIEQPTRTNSSGLAEA

SEQ ID NO: 359 - protein, 428 aa, Oryza sativa (japonica cultivar-group)
MDMSESSEKGMESNASSGPGNGIPVEWQSQFSSAFACQPSVAAQHQQHAMMDSFAAASAGLWASSDVVSAMSSAAPPRGAGFLAPVPGFLQQGLGHFPVDSGFIERAARSTCFGGGMMAGGPYGAADQAMGDAFGGTAEGLMDHHRNVGNDKAEEFAGNGHDEVPSSEVAGGDCSSKGSDSKKRRRPNEVMGTDQVHSSNLPSDSANESVHSKDKGEESSPATTNGGKSKGKGAKETSESQKEEYIHVRARRGQATNSHSLAERLRREKISERMKLLQDLVPGCSKVTGKAVMLDEIINYVQSLQRQVEFLSMKLATVNPRLDLNIEGLLSKDLLRFPGVPSSSIGFSPEMMHPQLQLSQPGLIHGGTAGMANPDVFRRIIQAQLGAKDGSQMPHSLNGSFSDVSQMAYPSLGSQDLSIRPSQDGFQM

SEQ ID NO: 360 - protein, 150 aa, Zea diploperennis
MDWDLKAAGAWDLAELEQDHAAAAPSSGGHAANAAAAGTGTESRPPAPGAAGAPAECSVDLKLGGMGECEPGAARREREVVAGAAKRPRPAGPGGQQQQQCPSCAVDGCRADLGKCRDYHRRHKVCEAHSKTPVVVVAGREMRFCQQCSR

SEQ ID NO: 361 - protein, 244 aa, Nicotiana tabacum
MGRGRVQLKRIENKINRQVTFSKRRSGLLKKAHEISVLCDAEVGLIVFSTKGKLFEYATDSCMERILERYERYSYAERQLVATTDHSCPGSWTLEHAKLKARLEVLQRNQRHYTGEDLDSLSTKELQNLEHQLDSALKHIRSSKNQLMHESISELQKKDKALQEQNNQLCKKVKEREKELAQQNQREQQNQELNSPSFIFQQQLDSPNLGEAYQSTAEENGEVEGGSQQQTANTVMPPWMIRHL

SEQ ID NO: 362 - protein, 379 aa, Zea mays
MLLSGPPPVPTPPLLLPESSGEDGGHDSSSRAAAAVGSAPKRRAETWVREETLCLIALRREMDAHFNTSKSNKHLWEAISARMRDQGFDRSPTMCTDKWRNLLKEFKKARSHSRNSGGGSGSGGNGNAKMAYYKEIDDLLKRRGKATGSGTAGCVGSSAGKSPKSNCKIDSYLQFTTDNGFEDANIPFGPVEANGRTILSIDDRLEDDRHQLPLTAADAVATNGVNPWNWRDTSTDGGDNRGNFGGRVILVKWGDYTKRIGIDGTPEAIKEAIKSAFGLRTRRAFWLEDEDEVVRTLDRDMPVGTYTLNLDDGMTIKLCDASRMQTPEDKTFYTEEDFRDFLSRRGWTFLREYGGYRNVDSLDDLRPGVMYQGLRSLGD

SEQ ID NO: 363 - protein, 344 aa, Capsicum annuum
MDRVKGPWSPEEDELLQQLVQKHGPRNWSLISKSVEHRAFTPEEDETIIRAHARFGNKWATIARLLNGRTDNAIKNHWNSTLKRKCSSLSADEGNELADQIFENQQPPLKRSVSAGSAMPVSGFHFSPGSPSGSDSDSSLHVTSSSQSHVFKPVARTGGVFPQSIDISSPPVDPPTSLSLSLPGVDLAEFSNRSADSTQSKNPFQLLLPPMQIPPPPPPPPPPPPQATTVPFERVSAIQQSLQNPDFGKNAGGEQPDKVFVPFSQELLGVMQEMIKTEVRNYMMGVEQKQQFQQQQQHYQQQPQQFQQQNHQLPSGLGLGLCMQQASDGFRDRAANRMRLSKFD

SEQ ID NO: 364 - protein, 1298 aa, Arabidopsis thaliana
MAEDPSFLPKDGFVLKLPKKSSLVLRMVVLLFVMVCAVYICSICLKQIGVSPNYGFLNVEVFERPCPEPNIEPWDIPFVHYPKPKTYNRDECSCHPVRYFAILSMQRSGSGWFETLLNNHTNISSNGEIFSVKDRRANVSTIFETLDKVYNLDWLSSASKNECTSAVGFKWMLNQGLMKHHEEIVEYFKTRGVSAIFLFRKNLLRRMISVLANSYDRDAKLLNGTHKSHTHSAKEAEILAGYKPMINTTLLINELRQIQEMTLKALTYFNTTRHILVYYEDVVKNLTRLDDVQEFLKVPKRKLKSRQVKIHGEMEEKRRDSAGTLAFAGSSGDSPASEPMPAPRRRGGGLKRKANALGGSNFFSSAPSKRMLTREKAMLASFSPVHNGPLTRARQAPSIMPSAADGVKSEVLNVAVGADGEKPKEEEERNKAIREWEALEAKIEADFEAIRSRDSNVHVVPNHCGWFSWEKIHPLEERSLPSFFNGKLEGRTSEVYREIRNWIMGKFHSNPNIQIELKDLTELEVGDSEAKQEVMEFLDYWGLINFHPFPPTDTGSTASDHDDLGDKESLLNSLYRFQVDEACPPLVHKPRFTAQATPSGLFPDPMAADELLKQEGPAVEYHCNSCSADCSRKRYHCPKQADFDLCTECFNSGKFSSDMSSSDFILMEPAEAPGVGSGKWTDQETLLLLEALEIFKENWNEIAEHVATKTKAQCMLHFLQMPIEDAFLDQIDYKDPISKDTTDLAVSKDDNSVLKDAPEEAENKKRVDEDETMKEVPEPEDGNEEKVSQESSKPGDASEETNEMEAEQKTPKLETAIEERCKDEADENIALKALTEAFEDVGHSSTPEASFSFADLGNPVMGLAAFLVRLAGSDVATASARASIKSLHSNSGMLLATRHCYILGDPPDNKKDPTKSKSCSADAEGNDDNSHKDDQPEEKSKKAEEVSLNSDDREMPDTDTGKETQDSVSEEKQPGSRTENSTTKLDAVQEKRSSKPVTTDNSEKPVDIICPSQDKCSGKELQEPLKDGNKLSSENKDASQSTVSQSAADASQPEASRDVEMKDTLQSEKDPEDVVKTVGEKVQLAKEEGANDVLSTPDKSVSQQPIGSASAPENGTAGGNPNIEGKKEKDICEGTKDKYNIEKLKRAAISAISAAAVKAKNLAKQEEDQIRQLSGSLIEKQLHKLEAKLSIFNEAESLTMRVREQLERSRQRLYHERAQIIAARLGVPPSMSSKASLPTNRIAANFANVAQRPPMGMAFPRPPMPRPPGFPVPGSFVAATTMTGSSDPSPGSDNVSSV

SEQ ID NO: 365 - protein, 256 aa, Physcomitrella patens
MSAVDRSTESSWSSRQTGTHWDNSHPQEGGGRSINRSDWNANSWRWDGAALSAQRISRTPHGSGLDSSRDVTHRENGRQRGSADLGLQLDVRATGTAEPNHQVIHIDDDETEVQGQTFFGRHTPSPPSNEPNPYNRGDESPEDDGPLSLKLGGSSYAYEHNGAGKRPRSSSPQSQIPTCQVDGCTADLSRAKDYHRRHKVCEAHSKAPTTLVSRVRQRFCQQCSRFHPLDKFDEDKRSCRRRLAGHNKRRRKTQPD

SEQ ID NO: 366 - protein, 220 aa, Brassica napus
MNNQNVNDNNLLLISRMYPNVYASSVPQQVDSKPVRPRRRRKSKNVEMAQEGGDGSNGWFRKRKLSDEQVRMLEMSFGLEHKLESERKNRLASELGLDSRQVAVWFQNRRARWKNKRLEDEYTKLKNEHENVVVQKCHLDSEVLHLKEQLYDAEIEIQRLAQRVEGALSNSPISSSISVEANLTTPFFGDYQIGDDGEGYENLFYSPEYIDGFEWMSPLM

SEQ ID NO: 367 - protein, 563 aa, Nicotiana attenuata
MASSGGNMNTFMNSFTSNYSFSSFSDLLSDNNNNNNNNNNMRSNNSSMNQEKNSLNWGFSDQRMNQQNKDEVPKFKSFPPCSLPMISSSSPASPSSYLAFPPSLSPSVLLDSPVLFNNSNTLPSPTTGSFGNLNSKEDNSKISDFSFQSRAATSSSMFQSSAPRNSLEDLMTRQQHANQQNEFSTAKTTGVKSEVAQIQSFSQEKMQSYPAPVHYTQPSQYVREQKAEDGYNWRKYGQKQVKGSENPRSYYKCTFPNCPTKKKVERNLDGHITEIVYKGNHNHPKPQSTRRSSSQSIQNLAYSNLDITNQPNAFLDNAQRDSFAGTDNSSASFGDEDVDQGSPISKSGEDDGNEPEAKRWKCDNENEVISSASRTVREPRIVVQTTSDIDILDDGYRWRKYGQKVVKGNPNPRSYYKCTFTGCPVRKHVERASHDLRAVITTYEGKHNHDVPAARGSGSYAMNKPPSGNSNNSMPVVPRPSMLANNSNQGMNFNDTFFNTRVQTTQNQPPITLQMLQSSGSSSYSGFDTSSGSYMDQMQPMNNTKPISKEEPKDDLFFSSFLN

SEQ ID NO: 368 - protein, 321 aa, Oryza sativa (indica cultivar-group)
MGDEEDLELVLGVRATRRDEQDDQTTCTQSSEEAMEGEEDETRPHGEAPVESLSFPLFVSSAETGSANSEMCTRGFDVNTRPADGGAEAGRPSSPSSMQEASTRQQVADQEAADDEDNGGGGARKKLRLSKEQSSFLEDSFKEHSTLTPKQKSDLANRLNLRPRQVEVWFQNRRARTKLKQTEVDCEHLKRCCERLTRENRRLQREVAELRGALRTTTSSYPPLYGLHHLPAAAGTVFRVCPSCEHSKVVAAAASESFSPRVFAGGGAPAAITAAAAVPSPGAGSPPSSSAALFGARRPHFGPFAAAVIPPVLRRQPSATS

SEQ ID NO: 369 - protein, 98 aa, Brassica napus
  misc_feature (36)..(36): Xaa can be any naturally occurring amino acid
  misc_feature (48)..(48): Xaa can be any naturally occurring amino acid
  misc_feature (85)..(85): Xaa can be any naturally occurring amino acid
MDFFSLDSVFQEEGENFWDMIAGDVSGDGDGDKTVXVPNRSAFRSYVXDHEQRMVSSSSTVNVKRRMVNLLRKNWEEKKIASSAXRKERSRRHMMKER

SEQ ID NO: 370 - protein, 420 aa, Ashbya gossypii ATCC 10895
MDTPSAALHRHTVGQLRKLLLHREGSAGCGRLQPALDGSQPLDSPLSTVPSSRSQVRVQQELWKQDPTYFQKAALSALACMKILRHAFDGGDMEVLGMLLGYVQDEMIVVVDSYRLPVEGTETRVNAQMESYEYTVQYLETAVPEGLAIVGWYHSHPGYGCWLSGIDAETQTLNQNFQDPYLAIVVDPKRSKASGVIDIGAFRTMPETADTRSVSSHSNASRYGHHSARYYELEVSYFEVPQERRWCDSRLSVEPPKPADATERAMLAQLLEAAKACKNVKRLQTVDRALVPESIGPYALREQADQDLQFRRPLRSFSSNSIARRSSTEVALGNANEELDPLPTLADANLRNHDSPSADMAMDNTSISSNEEQPHLTFQESSGVQLNAAETEYFDIKNELLTLKLLEYQKARFYRDAFTL

SEQ ID NO: 371 - protein, 158 aa, Zea mays
FDLGGGRWVGGWLTKVVSVSALQKQKAALASRLGLRARQVEVWFQNRRARTKLKQTEVDCEYLRRWCEQLAEENRRLGKEVAELRALSAAPAPAAPLTALTMCLSCRRVSSSSCSSSPPNTHAHAAAAGTGRSVAAAAATTLPAHRQFLCGFRDGGAA

SEQ ID NO: 372 - protein, 172 aa, Brassica napus
MAYEKVNELNLKDTVDRLGLPGTGQVKEEQEVSCVRSNKRQHQSDNEEESTPPTKTQIVGWPPVRSYRKNNNSVVSYVKVSMDGAPYLRKIDLKTYKNYSELLKELENMFKFTIGEYSEREGYKGSGVVPTYEDKDGDWMLVGDVPWDMFSSSCKRLRIMKGSDALALDSAL

SEQ ID NO: 373 - protein, 307 aa, Zea mays
MEGTAAARKRSRPETANGAAAAGKRSKDTESFQTGLSSKSKPCTKFFSTIGCPFGEGCHFLHFVPGGYPAVAKMLNLSSSAVSAPSRTHVDHAALTGASHPASTVKTRMCTKYNTTEGCKFGDKCHFAHSERELAKPAYMSQEGPPMGGRYGRAEPMQPAAMGPPAGNFGASATAKISVDASLAGGIIGKGGVNTKQISRITGVKLSIRDHESNPNLKNIELEGNFDQIKQASDLVRDLIATISASMPAKNPSAAAAPAGGGRGGGPGGKSSNYKTKLCENFLKGACTFGDRCHFAHGETEQRRGAA

SEQ ID NO: 374 - protein, 185 aa, Arabidopsis thaliana
MEYWSSSFIDGASSSSFISPFYNFDHFSGNQDNRCLGTMMGAQQDILHVPLAMVESGYGEESNSFNGQEKKKKKMTSEQLKFLERSFQEEIKLNPDRKMKLNPDRKMKLSKELGLQPRQIAVWFQNRKARWKNKQLEHLYESLRQEFDIVSREKELLQEELIQLKSMIREDSSCKKKQTWEKACS

SEQ ID NO: 375 - protein, 367 aa, Dendrobium sp. XMW-2002-1
  misc_feature (176)..(176): Xaa can be any naturally occurring amino acid
MGRSPCCDKVGLKKGPWTPEEDQKLLAYIEKHGHGSWRALPNKAGLQRCGKSCRLRWTNYLRPDIKRGKFSMQEEQTIIQLHALLGNRWSAIATHLPKRTDNEIKNYWNTHLKKRLAKMGIDPITHKPKSDNLSSADGHSKCTANLNHMAQWESARLEAEARLVRESKLRSSSISXNTTTIFTSKNQPLLPPAVPMTPAASPCLDVLSAWQGAWTKPAANNSQGRGYTIDLESPTSTLSFSDNMMAPTISGMGLAEDSTREDQEWKCLRKTGFSMHTAAPFVSTEASSWLSESSGGDFAAGFTGMLSDKANEQNSEDGCNDSDNAECGSCVDVEESEGEEDENKNYWSSILNLVNSSSPPNSPPPVF

SEQ ID NO: 376 - protein, 626 aa, Zea mays
  misc_feature (16)..(16): Xaa can be any naturally occurring amino acid
MKREYQNAGGNDGYMXSSKDKSMAAAAAGAGEQEEEVDELLAALGYKVRSSDMADVAQKLEQLEMAMGMGGACPTADDGFVSHLATDTVHYNPSDLSSWVESMLSELNAPPPPLPPATPAPRLASTSSTVTSGTAAGAGYFDLPPAVDSSSSTYALKPIPSPAVAASADPSPDSAREPKRMRTGGGSTSSSSSSSSSMDGGRTRSSVVEAAPPATQAANGPAVPVVVVDTQEAGIRLVHALLACAEAVQQENFSAADALVKQIPVLASSQGGAMRKVAAYFGEALARRVYRLRPAPDGSLLDAAFADLLHAHFYESCPYLKFAHFTANQAILEAFAGCRRVHVVDFGIKQGMQWPALLQALALRPGGPPSFRLTGVGPPQPDETDALQQVGWKLAQFAHTIRVDFQYRGLVAATLADLEPFMLRPEGGGDTDDEPEVIAVNSVCELHRLLAQPGTLDKVLGTVRAVRPRIVTVVEQEANHNSGTFLDRFTESLHYYSTMFDSLEGAGSGSGSGSGSGQPTDASPPAGTDQVMSEVYLGRQICNIVACEGAERTERHETLVQWRGRLGGSGFEPVHLGSNAYKQASTLLALFAGGDGYRVEEKDGCLTLGWHTRPLIATSAWRVAAP

SEQ ID NO: 377 - protein, 589 aa, Glycine max
MDSEDDMHDANDVESLDDDFYSGETEDPPMDYYSDYDDNADDYFDDADDSDRIESRRPEQNFTILRELDIRQRQEDDIARVAAVLSIPRVSASILLRHYNWSVSKVHDAWFADEDQVRKTVGLLEKPVFQNSNTRELTCGICFEMYPRARVESTACGHPYCYSCWAGYFSTSINDGPGCLVLRCPDPSCGAAVGQDMINLLASDEDKQKYDRYLLRSYIEDNKKTKWCPAPGCEYAVTFDAGSGNYDVSCLCSYSFCWNCTEEAHRPVDCGTVSKWILKNSAESENMNWILANSKPCPKCKRPIEKNQGCMHMTCTPPCKFEFCWLCLGAWSDHGERTGGFYACNRYEAAKQEGVYDETERRREMAKNSLERYTHYYERWASNQSSRQKALADLHQMQTVHIEKLSDTQCQPESQLKFITEAWLQIVECRRVLKWTYSYGYYLPEHEHAKKQFFEYLQGEAESGLERLHQCAEKELQLFLNADGPSKDFNDFRTKLAGLTSVTRNYFENLVRALENGLVDVDSNGAASSKATSSKNAAGSSKGRGGRGKATIRTISSRMTDDNHWSCEHCTYANVKSATTCQMCNQQRR

SEQ ID NO: 378 - protein, 371 aa, Dendrobium sp. XMW-2002-2
MWRHSCCYKQKLRKGLWSPEEDEKLLKHITKYGHGCWSSVPKLAGLQRCGKSCRLRWINYLRPDLKRGTFSQQEENLIIELHGVLGNRWSQIAAQLPGRTDNEIKNLWNSCIKKKLRLRGIDPNTHKPLAETEVQLAEIDSADQPAPEPEKHTVQQTETGVPNNSVRPGNSPAASYFSLPDLTYSPDCGGSIGQIQQFWLNQSGKFFSNNNSNSEFSFNSVSSLVPSVPRSTLSTSKELKPLTSLLMENSPSGFYWETGNSSNSSASSGSNDPLFDGSIFQWTQLIPERDINVQLHGETEDLKWSEYLNGSIPLSTELQSQNPELCNGMKAEEQFGIDGLSIWLQNHQQQQQQQQQASNNYGKDSQRDIIC

SEQ ID NO: 379 - protein, 467 aa, Oryza sativa (japonica cultivar-group)
MSAAAEEAAAAAAAEEVEGVEAGKKGVADAKGKGKEKVVVAEEDSAVAAGSGGSGGGRRTLVAYPARVAGYKDVVADAAVFRRALEGLHAQMGTKLKVPIIGGKDLDLHQLFKEVTSRGGIDKVKSDNRWREVTASFIFPATATNASFMLKKYYMSLLYHFERLYLFEAQGWYQETDSRSISCIEMKAEGQASRKRKRGSNSCSSDLAASLDNDVQVIIDGKFEHGYIVTVIMGSKSTKAVLYNCTEEPAVPTAVPHVAIDSAEGIRPRRRRRRKKLSTTDPNHPKPNRSGYNFFFQDQHRKLKPEYPGQDRLISKMIGERWNNLGPEDKAVYQEKGVEDKARYQRQLALYREQRTGQPISNAVPIQQRLPQKEVTIDEVDSKVSEGDILLSNQGYSSSTSSSDETADSGEKNVEDDEEFNTETSPEPSMETTDSHGQPDPSADGERFELRRRENPKIDEKRDMPPN

SEQ ID NO: 380 - protein, 169 aa, Glycine max
MAARRLLEEAVAAGAQQDSLNSDLVLILAGLLCALVCVLGLGLVARCACSRHWARAADAPPGANRGVKKEVLRALPTVRYVADGGEASESDECAICLAEFEDGQDMRVLPQCSHAFHTACVDAWLRSHSSCPSCRRVLVAELPRGERSGRCGARPGGLDALLKAVPLCR

SEQ ID NO: 381 - protein, 295 aa, Glycine max
MIAVARKDMDRIKGPWSPEEDEALQKLVERHGPRNWSLISRSIPGRSGKSCRLRWCNQLSPQVEHRAFTPEEDETIIRAHARFGNKWATIARLLSGRTDNAIKNHWNSTLKRKCASFMMAGDEAVAVSPRPLKRSFSAGAAVPPPGSPSGSDFSESSAPGVVSVSPSHVFRPVPVRPIVETASSQDDADDAGPATSLSLSLPGVESAEISNRATTVPVMPVNTVAAPAPVPAEVGLGALNLSGEFMAVMHEMIRKEVRSYMEQQKNGMMCFQGMEMMEGFRNVSVKRIGISRVDS

SEQ ID NO: 382 - protein, 568 aa, Coprinopsis cinerea okayama7#130
MTLGDGQAQQIPEEVQVFTDPGSNYTCDSCGRDLTHSVRMKCADPACQADEGADICPSCFCAGKEFKDHKRWHAYRVIDVHSYPIFTEDWGADEEYLLLAGIKLFGIGNWKKVAEHIGTRTTEEVAKHYHKVYVESPDWPRPRMDVEFNIDPYEFQSRKRRRISEMNKRVIPIPGPAPTSAPGIHEISSYFPGRLEFEHELDNEAEDLVKDLEFGVVYQYGGDEIPEDDHDPDVKARKKFEEDKLAGLHDFPESSATPGPTFASNGNVNGHQTNGIVKKEVKSEDVVMGNPEDEVEEPVIPQPYETQASLDFKLTLLQMYFQRVEKRLEAKAFMFERGLLDYKKWQTAERKRPKEEREFIHRLRPFAKLQTAADYEAFTTDMLYEAMLRKRIQELQHYRRLGLCNAADIDKYETDLIKRTQIKAARDYIVVDSSRRREGSREPTPRLASGTGPPVRKPPAPLNLANSPSLHLLTPAEQALCSQLRILPKPYLVIKETLVREYARRGGKLRRREARDLVKIDVNKTSRVWDFLVQAGYLKISTDMTAAAAASNASGTPAPTADPRQANL

SEQ ID NO: 383 - protein, 108 aa, Arabidopsis lyrata
QNYSVLSEVDICKLQEDDISRISTVLSIPRNSSAILLRHYNWCVSRVHDEWFADEEKVRDAVGLLEKPVVDFPIDGELECGICFEAFLCDKLHAATCGHPFCDSCWEG

SEQ ID NO: 384 - protein, 537 aa, Gossypium hirsutum
MKRDHQEISGSGSNPAESSSIKGKLWEEDPDAGGMDDELLAVLGYKVRSSDMADVAQKLEMLEKVMGTAQEDGISQLGDTVHFNPSDLSGWVQNLLIEFNGSTTTPDPNFNDDSEYDLRAIPGVAAYPPVKSDPGLEITRKRAKTESSSSSSSTTTRPVVLIDSQEAGVRLVHTLMACAEAVQQDNLKLADALVKHIGLLASSQTGAMRKVATYFAEALARRIYRIFPPDSLDPSYNDKLQIPFYETCPYLKFAHFTANQAILEAFSMASRVHVIDFGLKQGMQWPALMQALALRPGGPPAFRLTGIGPPQPDNTDALQQVGWKLAQLAERIGIEFEFRGFVANSLADLEPEMLDIRPPEIEVVAVNAVFELHPLLARPGGIEKVVSSIKAMKPKIVTVVEQEANHNGPVFLDRFTEALHYYSTLFDSLEGSGVAPASQDLAMSELYLGRQICNVVACEGMDRVERHEPLTQWRTRMETAGVSPVHLGSNAYKQASMLLALFASGDGYRVEENNGCLMLGWHTRPLIAHLGLATRWY

SEQ ID NO: 385 - protein, 249 aa, Arabidopsis thaliana
MEEGGSSHDAESSKKLGRGKIEIKRIENTTNRQVTFCKRRNGLLKKAYELSVLCDAEVALVIFSTRGRLYEYANNSVRGTIERYKKACSDAVNPPSVTEANTQYYQQEASKLRRQIRDIQNSNRHIVGESLGSLNFKELKNLEGRLEKGISRVRSKKNELLVAEIEYMQKREMELQHNNMYLRAKIAEGARLNPDQQESSVIQGTTVYESGVSSHDQSQHYNRNYIPVNLLEPNQQFSGQDQPPLQLVG

SEQ ID NO: 386 - protein, 304 aa, Triticum aestivum
MEGGGRKRGTADGAAVGGKRTRESESFQTGVGSKSKPCTKFFSTAGCPFGEGCHFLHYFPGGHQAVAKMSNLGGQAFAHPQGRMPSGSAVPDGHPTPTVKTKLCNKYNTAEGCKWGDKCHFAHGERELGKQTFINNSMPPHMGPRPTGHFGPPAMPSPGMATPAGFGASSTAKVSVDASLAGAIIGRGGVNTKQISRVTGAKLAIRDHESNEALKNIELEGTFDQINNASAMLRELIFRISGGANAPPPGVIPAGGSHRGGGGSGQGSNFKTKLCDNFTKGSCTFGDRCHFAHGENELRKSAAV

SEQ ID NO: 387 - protein, 261 aa, Rosa rugosa
MGRGKIEIKLIENQTNRQVTYSKRRNGIFKKAQELTVLCDAQVSLIMQSSTDKIHEYISPTTTTKKMFDLYQKNLQIDLWSSHYEAMKENLWKLKEVNNKLRRDIRQRLGHDLNGLSYAELQDLEETMSQSVQIIRDRKYHVLKTQAETTRKKVKNLEERNSNLMHGYGAPGNEDPQYGYVDNEGDYESAVALANGASNLYFFNRVHNNHNLDHGHGGGSLVSSITHLQNPNNHGNHNLENGHGGGSLISSITHLHDLRLA

SEQ ID NO: 388 - protein, 266 aa, Tripsacum dactyloides
ASADPSTDSAREPKRMRTGGGSTSSSSSSSSSMDGGRTRSSVVEAAPPATQASAAANGPAVPVVVVDTQEAGIRLVHALLACAEAVQQENFSAAEVLVKQIPMLASSQGGAMRKVAAYFGEALARRVYRFRPPPDSSLLDAAFADLLHAHFYESCPYLKFAHFTANQAILEAFAGCRRVHVADFGIKQGMQWPALLQALALRPGGPPSFRLTGVGPPQPDETDALQQVGWKLAQFAHTIRVDFQYRGLVAATLADLEPFMLQPEGD

SEQ ID NO: 389 - protein, 302 aa, Hordeum vulgare
MGRPSSGAVGQPKVRKGLWSPEEDEKLYNHIIRHGVGCWSSVPRLAALNRCGKSCRLRWINYLRPDLKRGCFSQQEEDHIVALHQILGNRWSQIASHLPGRTDNEIKNFWNSCIKKKLRQQGIDPATHKPMASADTATAAAALPDAEEEDRKPLCPAVDGSLVPKQPAVFDPFPLCVDYGAGFAEELGAANAAALYGQLCGGKEVADDDAGFGAADYSCVLDVSENLGYGESSSNSSNWNYGGEVGSVLDGEVPHWAKAEPAFAEMERQQQHSPAEQKLSLPCQEQSLLASFDFNLELEPYF

SEQ ID NO: 390 - protein, 378 aa, Oryza sativa (japonica cultivar-group)
MSPPPPPYYHHLLLLRSSPTTTGGGARVLAAAELARMKLLCSACEAAEASVLCCADEAALCARCDRDIHAANRLAGKHLRLPLLSPASSSSSSAAALAPPPPSPPKCDICQESHAYFFCLEDRALLCRSCDVAVHTANAFVSAHRRFLLTGVQVGQEQDEHSPDPPEPSPPPPPPPPASKSDHPAPLYGEGGGGFSWDAADSPAAGGLPDWSAVVDQFGSPPPPRHTDTATVTTPPPTKRSPRAPAFGGQGGMMDWPLGEFFGGFTDFTGGFGFGFGDSGTSKADSGKLGGSTDGSPYYRSSSEDDRNADELFGQVPEIQWSVPELPSPPTASGLHWQRHPAATHGGGGGGPDTTAFVPDICSPDSCFPATTSKRRRQ

SEQ ID NO: 391 - protein, 315 aa, Triticum aestivum
  misc_feature (215)..(215): Xaa can be any naturally occurring amino acid
MTRRCSHCSHNGHNSRTCPNRGVKIFGVRLTDGSIRKSASMGNLSLLGGSTSGGGGASPADVGHDAAAEGYASDDFVQGSSSANRERKKGVPWTEEEHRRFLLGLQKLGKGDWRGISRNFVVSRTPTQVASHAQKYFIRQANMSRRKRRSSLFDLVPDESDLPPLPGNQEPEAQILNHPPLPPPMEEEEVESMESDTSVIAESSSASAIMPENLXQSSYPVLVPAYFSPFLQFSVPFWQNQNDGDDLGQGTHEIVKPVPVHSKSPINVDELVGMSKLSIGDPKQDTVSTSLSLKMVGGQNRQSAFQANLPTRAQA

SEQ ID NO: 392 - protein, 437 aa, Catharanthus roseus
MGSCLNFENISNMAQPEGSLGKTPGNFPLARQTSIYSMTFDELQTLGGLGKDFGSMNMEDLLKNIWTAEETQATASTPGPGNVPGGNLQRQGSLTLPRTLSQRTVDDVWKDLLKESGGTNDRIGVGASNFVPRQSTLGEMTLEEFLVRAGVVREEIQPIEKPSNLGAYGGLAPANVNNNSLVIGFQQAAVNDRMLGNQNGGSNNGFSNSSNLLLNGSALRSSQQQQHPQSQPQLQPLFPKQANVAFASSQLGNANVQQMRNGAQLSSSGATASVVGMANASMNSTMMKTGVTPTGVMGMAGLRGVTTSVTGESPGSQLQTDSISKSSVDTSSLSPSPYAFNEGGRGRRSCSSLEKQVERRRRRMIKNRESAARSRARKQAYTLELEAEVAKLKEINEELQRKQAELMEMQKNQMLETMEMPWGGKRRCLRRTLTGPW

SEQ ID NO: 393 - protein, 359 aa, Antirrhinum majus
MGRSPCCDKVSLKRGPWTPEEDQKLLSYIQEHGHGSWRALPSKAGLQRCGKSCRLRWSNYLRPDIKRGKFSLQEEQAIIQLHAFLGNRWSAIATHLPKRTDNEIKNYWNTHLKKRLTKMGIDPMTHKPKSHDVLGCGQPKVVANLSHMAQWESARLQAEARLVRESRLVSHHYHSQLLNRATAITHPTLPPCLDVLKVWHGAWTTRPGKDIITSAMFNGFFASNNGNLESPTSILKSSDNMLNASTSVGLLHENPFITDMSYVGKPSNVYEDWVKGIMDNSNELNKIIEPIDSTHYVAHDDDSIGFPGFMEGSTNLVTSTVRTNGPDDDNVVGVFEENDINYWRNVLNVVNSPMGSPVF

SEQ ID NO: 394 - protein, 199 aa, Zea mays
MARGKVQMRRIENPVHRQVTFCKRRMGLLKKARELSVLCDAAIGVIVISPHGKIYDLATNGNMQGLIERYRRACSEMHGESSNHNETQTIKQEVLALTHEIDLLQKGFRYMHGENDIDHMNLVELQTLENNLEMWANNIRSQKMQIISREIDMLRNKEAILQAVNGVLQERIIEQNGILNFSGTAMTPSQLTMESNYYL

SEQ ID NO: 395 - protein, 271 aa, Solanum tuberosum
MSTPMMCTSLGVIRKGSWTEEEDILLRKCIDKYGEGKWHLVPTRTGLNRCRKSCRLRWLNYLRPHIKRGDFDWDEVDLILRLHKLLGNRWSLIAGRLPGRTANDVKNYWNTNLLRKLNTSTKFAPQPQEGINTSTIAPQPQEGINTSTIAPQPQEGIKCGQANAIIRPQPQKFTSSMKINVSWCNNNSIVNNEEASKDNNDMQWWANILENCNDIGEGEAERTLPSCKEINCNEIDKTPSLLHDGGNSMQQGQGDGGWDEFSLDDIWNLLN

SEQ ID NO: 396 - protein, 274 aa, Medicago truncatula
MQPSRRKCVRISSPEKESKHFMKAILPSPIHSKQIRIPDEFITRFGNELNNVATITVPDGRVWKMELKKRGENVFFCNKWQEFVEYYSIGYGCFISFKYEGNSKFSVIIFDATSVEISYPFETPSTNGEPKTNYPSSRKRSKVETCERLRKKVKNMSKYASKRVEDAAKELNPNNPYFRSKIVKGKYAYVNFDFATKYLKPNIPIKLQNSHGEQWEVFGIFHDARSSAIQITRGFSIFQKDNNLSYGDYCVFELIKTKPVVLKVTMFRAIDYCD

SEQ ID NO: 397 - protein, 192 aa, Triticum aestivum
MLLLHMLSQHQQHTHKALAAPVKLEAADGEEAGHQVSDGRAFRGVRKRPWGKYAAEIRDSTRNGVRVWLGTFDSPETAALAYDQAAFAIRGGAAVLNFPADHVRRSLEGVADDVCGRAHSVSPVLALKRRHSMRSRKATAAGRKVKAATRGAQPEGMVMELEDLGAEYLEQLLGASEDTATMDSWCWSHHFI

SEQ ID NO: 398 - protein, 206 aa, Arabidopsis thaliana
MALSPNSSSLDLTISIPSFSPSPSLGDHHGMRDFDINQTPKTEEDREWMIGATPHVNEDDSNSGGRRRKKLRLTKEQSHLLEESFIQNHTLTPKQKKDLATFLKLSQRQVEVWFQNRRARSKLKHTEMECEYLKRWFGSLKEQNRRLQIEVEELRALKPSSTSALTMCPRCERVTDAVDNDSNAVQEGAVLSSRSRMTISSSSSLC

SEQ ID NO: 399 - protein, 292 aa, Glycine max
MKIQCNVCEAAEAKVLCCADEAALCWECDEKVHAANKLASKHQRVPLSLSASHMPKCDICQEMVGYFFCLEDRALLCRNCDVSIHTANACVSDHQRFLLTGVRVGLEATERGASSSSVKSQSGEKMSDAKSSSISRNVSSLPQPSNANEVLPLQMQGVEEFPPSNFSGYTSGNVSQWPIEEFLGLNELSQYYNYMDGSSKADSGKLGDSDSSVLRSGEEDMDDDGFLGRVPDSSWTVPQIPSPPTASGLYWPKVPQYTSDSAMSVPDICFSHVRQPHHAQHNSNVSKRRRQL

SEQ ID NO: 400 - protein, 519 aa, Triticum aestivum
MPMLPSSFTTSSSWQSHQDASSICTNQELDYDHPYYFGIEEVAVDADELELGLRAHKATRVDYLSSPYQASWPSAQADLESSRVRKTKQFRDVLETCKQKVEAMEAMERSSSPVGSGGFEEQGEAVVAVDDVRGGGGGSGADGMRLVQLLVACAEAVACRDRAQAAALLRELQVGAPVHGTAFQRVASCFVQGLADRLALAHPPALGPASMAFCLPRSSCLDGARGEALAVAYELCPYLRFAHFVANTSILEAFEGESNVHVVDLGMTMGLNRGHQWRALLDSLATRACGKPARVRVTGVGARVDTMRAVGRELEAYANELGITLEFMAVDRTLESLHVDDLGVEADEAVAINSVLELHCVVKESRGALNSVLQTIRKLSPKAFVLVEQDAGHNGPFFLGRFMEALHYYAALFDALDAALPRYDARRARVEQFHFGAEIRNVVGCEGAARVERHERADQWRRRMSRAGFQSMPFKMAAKAREWLEENAGGSGYTVAEEKGCLVLGWKGKPVIAASCWKC

SEQ ID NO: 401 - protein, 247 aa, Glycine max
  misc_feature (162)..(162): Xaa can be any naturally occurring amino acid
  misc_feature (227)..(227): Xaa can be any naturally occurring amino acid
  misc_feature (238)..(238): Xaa can be any naturally occurring amino acid
LHNANTIHFNLHSQITLPSIPLTTITTTKPFPHNRHFPRIQCCSNNNNNNSIEIDMVKNSQGIYAPKASKVVVLWDLDNKPPRGPPYDVAISLKTLAARFGDLVDFSAYANRHAFVHLPQWVLQQRRDRKNLDILERKGIITPPEPYTCGVCGRKCKTHLDXKKHFKQLHQRERQKKLNRLKSLKGKKRHRFKERFLRGNHKYDDAARTLVVPKVGYGLAAELRRAXVFVKTVQDKPXAADWALKEQ

SEQ ID NO: 402 - protein, 437 aa, Oryza sativa (japonica cultivar-group)
MGECRGGGGGGDGLIKLFGKTIPVQPDAKDVQQHSGSSSSSTESDVQETAAVAVADPSPRSEVVDGESPPQPGGEAASHQQQQKEMKLKKPDKILPCPRCSSMDTKFCYFNNYNVNQPRHFCKHCQRYWTAGGAMRNVPVGAGRRKNKNATAAAHFLHRVRACAAAAAMPAAPHDATNATVLSFGGGGGGHDAPPVTLDLADKMTRLGKEGLVAHARNADAAAACSEVSSNRDDEQIGNTVAKPANGLQQHPPPPHHHHHSAMNGGGIWPYYTSGIAIPIYPAAPAYWGCMIPPPGAWSLPWPATVQSQAISSSSPPTSATPSVSSFTLGKHPREGGDHEARDHHGNGKVWVPKTIRIDNADEVARSSIRSLFAFRGGDKADDNNDDDGTGVHKLATTVFEPKRDSKTAKHPAITSLPLLHTNPVALTRSATFQEGS

SEQ ID NO: 403 - protein, 902 aa, Arabidopsis thaliana
MASEASPSSSATRSEPPKDSPAEERGPASKEVSEVIESLKKKLAADRCISIKKRIDENKKNLFAITQSFMRSSMERGGSCKDGSDLLVKRQRDSPGMKSGIDESNNNRYVEDGPASSGMVQGSSVPVKISLRPIKMPDIKRLSPYTTWVFLDRNQRMTEDQSVVGRRRIYYDQTGGEALICSDSEEEAIDDEEEKRDFLEPEDYIIRMTLEQLGLSDSVLAELANFLSRSTSEIKARHGVLMKEKEVSESGDNQAESSLLNKDMEGALDSFDNLFCRRCLVFDCRLHGCSQDLIFPAEKPAPWCPPVDENLTCGANCYKTLLKSGRFPGYGPIEGKTGTSSDGAGTKTTPTKFSSKLNGRKPKTFPSESASSNEKCALETSDSENGLQQDTNSDKVSSSPKVKGSGRRVGRKRNNNRVAERVPRKTQKRQKKTEASDSDSIASGSCSPSDAKHKDNEDATSSSQKHVKSGNSGKSRKNGTPAEVSNNSVKDDVPVCQSNEVASELDAPGSDESLRKEEFMGETVSRGRLATNKLWRPLEKSLFDKGVEIFGMNSCLIARNLLSGFKSCWEVFQYMTCSENKASFFGGDGLNPDGSSKFDINGNMVNNQVRRRSRFLRRRGKVRRLKYTWKSAAYHSIRKRITEKKDQPCRQFNPCNCQIACGKECPCLLNGTCYEKYCGCPKSCKNRFRGCHCAKSQCRSRQCPCFAADRECDPDVCRNCWVIGGDGSLGVPSQRGDNYECRNMKLLLKQQQRVLLGISDISGWGAFLKNSVSKHEYLGEYTGELISHKEADKRGKIYDRENCSFLFNLNDQFVLDAYRKGDKLKFANHSPEPNCYAKVIMVAGDHRVGIFAKERILAGEELFYDYRYEPDRAPAWAKKPEAPGSKKDENVTPSVGRPKKLA

SEQ ID NO: 404 - protein, 242 aa, Oryza sativa (indica cultivar-group)
MGRGRVELKKIENPTNRQVTFSKRRMGLLKKANELAILCDAQIGVIVFSGTGKMYEYSSPPWRIANIFDRYLKAPSTRFEEMDVQQRIIQEMTRMKDENNRLRIIMRQYMGDDLASLTLQDVSNLEQQIELSLYKVRLRKQQQLLDQQLLEMHSREMQIPGDQSNYLCHMNLIGEQAQAPLMANPKPFPLWDVGGSSQMYNQDAESSMTALQLSPQLEYKLQPLQPNLQEEANLHGYVLRLW

SEQ ID NO: 405 - protein, 279 aa, Oryza rufipogon
QPSPPSSPMSERPPSGRSRRRAQEPGRFLGVRRRPWGRYAAEIRDPTTKERHWLGTFDTAQEAALAYDRAALSMKGAQARTNFVYTHAAYNYPPFLAPFHAPQYAAAAAAPSSVQYGGGVGAAPHIGSYGHHHHHHHHHGHGAASGASSVGECSTMPVMVPVDPHRSSMSSSMLDMDRNGHDFLFSGADDNSGYLSSVVPESCLRPRGGGAAADHQDMRRYSDADAYGMMGLREDVDDLAQMVAGFWGGGDAADQLGACGFPASGGAADMVASSQGSDS

SEQ ID NO: 406 - protein, 84 aa, Prunus armeniaca
DLAVALEKLFGCFGIGEVLKDAENCEFAPIYEDKDGDWMLVGDVPWEMFTESCKRLRIMKRSDAKGFGLQPKGFLKATMKDDPI

SEQ ID NO: 407 - protein, 204 aa, Zea mays
EMSSQESRASRGIRRRKAVIDLNEVPRDHEGTTSASVREAPTVVPSGASVPSQPVPTMIDVDAIEDDVIESSASAFAEAKSKSAGARRRPLMVDVESGDTTRLPANVSNKRRRIPPNQPVIDCEHVPVDVRESSPKPPPPPPEEPKFSCPICMCPFTEETSTKCGHIFCKGCIKTAISRQAKCPTCRKRVTVKELIRVFLPTTR

SEQ ID NO: 408 - protein, 234 aa, Gossypium hirsutum
MLPAAMAAAGIRLWPGIQERDYGRGYKKGLWAMEEDKLLIDYVNVHGKGQWNKIANRTGLKRSGKSCRLRWMNYLSPNVKKGDFSEEEEDLVIRLHKLLGNRWSLIAKRVPGRTDNQVKNYWNSHLRKKLGIIDQNKTRIDFCQSSKQVKVCHVDEAATDPSPGHGTTTETTGITVDQSNQQEVIDHRVLNNTTQESMTSESYINTFWIPDHDYELSTLAMIDHFHECSSFHLS

SEQ ID NO: 409 - protein, 567 aa, Oryza sativa (japonica cultivar-group)
MGRSRGVPNSGDDETNHRSKRRRVASSGDAPDSLSAACGGAGEGGGKKALYHCNYCNKDISGKIRIKCSKCPDFDLCVECFSVGAEVTPHRSNHPYRVMDNLSFPLICPDWNADEEILLLEGIEMYGLGNWAEVAEHVGTKTKAQCIDHYTTAYMNSPCYPLPDMSHVNGKNRKELLAMAKVQGESKKVLPGDLTPKDESPFSPPRVKVEDALGEGLAGRSPSHIAGGANKKASNVGQFKDGANVAKVEDGHVDRSIGVKKPRYSADEGPSLTELSGYNSKRHEFDPEYDNDAEQALAEMEFKETDSETDRELKLRVLRIYLSRLDERKRRKEFILERNLLFPNPLEKDLTNEDKEVYHRYKVFMRFLSKEEHEALVRSVLEERKIRRRIQELQECRSAGCRTLAEAKIHIEQKRKKEHEVNAQKAKESGQLLSNTKVVHKTNRPMKIESDGNLDQKKGGASLDSTGRDSPKTTGHAGTKHWDDWDIVGFPGAELLSTSEKNLCCQNRLLPNHYLKMQEVLMQEIFKGSVAKKEDAHVLFKVDPAKVDNVYDMVTKKLGTNEEAPTV

SEQ ID NO: 410 - protein, 194 aa, Glycine max
  misc_feature (172)..(172): Xaa can be any naturally occurring amino acid
MENTTVTYQTDLNLKATELRLGLPGTEESEEKTLSAGARINNKRPLTETSDECASNGTSSAPHEKTETAPPAKTKIVGWPPIRSYRKNSLQESEGAGIYVKVSMDGAPYLRKIDLKVYGGYTQLLKSLENMFKLTIGEHSEKEGYKGSDYAPTYEDKDGDWMLVGDVPWDMXVTSCRKLRIMKGSEARGLGCAV

SEQ ID NO: 411 - protein, 324 aa, Zea mays
  misc_feature (151)..(151): Xaa can be any naturally occurring amino acid
MKVLCSACEAAEASVLCCADDAALCARCDREVHAANRLAGKHQRLPLLAPGGQGAAAVSPPKCDICQECDAYFFCLEDRALLCRSCDVAVHTANSFVSAHRRFLLTGVQVGQELEPDDLSLEQREAEASSPPPAKSEPTPPLYSESDFGWXPAPAPTGSLTDWSAVQEEFGSPAPRLAEAAPRATPKRTPRAPAFGAGQGRIAGGVMDWPLGEFFRGVSDFNGGFSFGESGNSKADSGKLGDSAGGSPYYRSSEEERDANELFGQVPEIQWSVPALPSPPTASGLHWQHGGPDSGAFVPDICTPDGAGRCFPTASGAAKRQRNR

SEQ ID NO: 412 - protein, 216 aa, Dendrobium sp. XMW-2002-8
MGRSPCCEKAHTNKGAWTKEEDERLVAYIKVHGEGCWRSLPKAAGLLRCGKSCRLRWINYLRPDLKRGNFTEEEDELIIKLHSLLGNKWSLIAGRLQGRTDNEIKNYWNTHIRRKLLSRGIDPTTHRPLHGQADASFVNEVEKVVSFRRREDENKSSNSSSSNSRSNSEEAKRWRCPDLNLELCISPPLQKQEDSEEDMMREEFGLCFTNGLLEFR

SEQ ID NO: 413 - protein, 220 aa, Dendrobium sp. XMW-2002-10
MGRSACCEKAHTNKGAWTKEEDERLIAHIRTHGEGCWRSLPKAAGLLRCGKSCRLRWINYLRPDLKRGNFTDEEDELIIKLHSLLGNKWSLIAGRLPGRTDNEIKNYWNTHIRRKLLNRGIDPATHRPVSTATASNLTMSFSSGSSVKDKRTSSSSSSSRVGRISALLPRCPDLNLDLCISPSLEEQMPQDLLVEESNCGGEFLRLGSSFLLDYRSLEMK

SEQ ID NO: 414 - protein, 357 aa, Medicago sativa
MEASSSSSSAIAQQTWELENNIIPMETPSDDSIFHYDEAGQAEFQRDKPWANDPHYFKRVKISALALLKMVVHARSGGTIEVMGLMQGKTDADSIIVMDAFALPVEGTETRVNAQADAYEYMVDYSQTNKQAGRLENVVGWYHSHPGYGCWLSGIDVSTQMLNQQFQEPFLAVVIDPTRTVSAGKVEIGAFRTYPEGYKPADDPISEYQTIPLNKIEDFGVHCKQYYSLDITYFKSSLDSHLLDLLWNKYWVNTLSSSPLLGNGDYVAGQISDLAEKLEQAENQLAHSRFGPLVAPTPRKKEEESPLAKITRDSAKITVEQVHGLMSQVIKDILFNSVHQANKSHTETSDPEPMIES

SEQ ID NO: 415 - protein, 295 aa, Zea mays
MKRPRGASPPLAAMTNPNDASPVLFFLRESIVFGGDVVAERVRRIESSRASADDGYGVVGMEADADADADEEMMACGGGGEKKRRLSSEQVRALERSFEVENKLEPERKARLARDLGLQPRQVAVWFQNRRARWKTKQLERDYSALRQSYDALRHDHDALRRDKDALLAEIKELKAKLGDEEAAASFTSVKAEPAASDGPPPVGVGSSESDSSAVLNDADPPVAEAPVPEVRGTLLDAPGAVAANHGGVFFHGSFLKVEEDETGLLDDDEPCGGFFSVEQPPPMAWWTEPTEHWN

SEQ ID NO: 416 - protein, 280 aa, Brassica napus
  misc_feature (33)..(33): Xaa can be any naturally occurring amino acid
  misc_feature (160)..(160): Xaa can be any naturally occurring amino acid
MESNSFFFDPSLSHGNMFFLNPAAVQEAKSMMXTEESSKRRPFFCSHEDLYDDDYYDDHTPEKKRRLTSQQVHLLEKSFETENKLEPERKTQLANKLGLQPRQVAVWFQNRRARWKTKQLERDFNLLKSSYDQLLSNYDSILKDNHLLRSEVFTFPFQTXTSLVEKLQAKEDTTNKPPGQVPEANPQQQLHPVNMNQIEPPIKTEDRLSSGSTVLDEDDAPQLLDSCNSYFPIIAPIHHSEGHNNRNGSVNDRSCFVDVFVPTTSPPHGHGESLGFWGWT

SEQ ID NO: 417 - protein, 311 aa, Arabidopsis thaliana
MMKRLSSSDSVGGLISLCPTTSTDEQSPRRYGGREFQSMLEGYEEEEEAIVEERGHVGLSEKKRRLSINQVKALEKNFELENKLEPERKVKLAQELGLQPRQVAVWFQNRRARWKTKQLEKDYGVLKTQYDSLRHNFDSLRRDNESLLQEISKLKTKLNGGGGEEEEEENNAAVTTESDISVKEEEVSLPEKITEAPSSPPQFLEHSDGLNYRSFTDLRDLLPLKAAASSFAAAAGSSDSSDSSALLNEESSSNVTVAAPVTVPGGNFFQFVKMEQTEDHEDFLSGEEACEFFSDEQPPSLHWYSTVDHWN

SEQ ID NO: 418 - protein, 298 aa, Arabidopsis thaliana
MNRGIEVMSPATYLETSNWLFQENRGTKWTAEENKKFENALAFYDKDTPDRWSRVAAMLPGKTVGDVIKQYRELEEDVSDIEAGLIPIPGYASDSFTLDWGGYDGASGNNGFNMNGYYFSAAGGKRGSAARTAEHERKKGVPWTEEEHRQFLMGLKKYGKGDWRNIARNFVTTRTPTQVASHAQKYFIRQVNGGKDKRRSSIHDITTVNIPDSPDAAAADNATANAPCSPPSVGGNQRETSEWEGQTLYDETAAAFYNQNAFSETLLGMSSTPYMAKLQEQSFLNASQFESYNAYLQM

SEQ ID NO: 419 - protein, 251 aa, Triticum aestivum
MASPEGSNWVFDCPLMDDLAAADFAAASAGGFYWTPPMQPQMHTLAQAVSATPAPNPCAEINSSVSVDWDHAKGQPKNKRPRSETGAQPSSKACREKVRRDKLNERFLELGAVLDPGKTPKIDKCAILNDAIRAVTELRSEAEKLKDSNESLQEKIRELKAEKNELRDEKQKLKAEKESLEQQIKFMNARQSLVPHPSVIPAAAFAAAQGQAAGHKLMMPVMSYPGFPMWQFMPPSDVDTSDDPKSCPPVA

SEQ ID NO: 420 - protein, 1819 aa, Helicobacter pylori J99
MNEENDKLETSKKAQQDSPQDLSNEEATEANHFEDLLKESTESSDNHLDNPTETKTHFDEDKLEETQTQMDSGGNETSESSNGSLADKLFKKARKLVDDKRPFTQQKSLDEETQKLNEEDDQENNEHQEETQTDLIDDETSEKTQQDSPQDLSNEEATEANHFEDLLKESTESSDNHLDNPTESSDNHLDNPTETKTQETKTHFDEDKPEEITDDSNDQEIIKGSKKKYIIGGIVVAVLIVIILFSRSIFHYFVPLEDKSSRFSKDRNLYVNDEIQIRQEYNRLLKERNEKGNMIDKNLFFNDDPNRTLYNYLNIAEIEDKNPLRAFYECISNGGNYEECLKLIKDKKLQDQMKKTLEAYNDCIKNAKTEEERIKCLDLIKDENLKKSLLNQQKVQVALDCLKNAKTDEERKECLKLINDPEIREKFRKELELQKELQEYKDCIKNAKTEAEKNECLKGLSKEAIERLKQQALDCLKNAKTDEERKECLKNIPQDLQKELLADMSVKAYKDCVSRARNEKEKQECEKLLTPEAKKLLENQALDCLKNAKTDEERKECLKNLPKDLQSDILAKESLKAYKDCASQAKTEAEKKECEKLLTPEAKKLLEEEAKESVKAYLDCVSQAKTEAEKKECEKLLTPEAKKKLEEAKKSVRAYLDCVSKAKNEAERKECEKLLTPEAKKLLENQALDCLKNAKTDEERKECLKDLPKDLQKKVLAKESVRVYLDCVSKAKNEAERKECEKLLTPEARKLLEEAKKSVKAYKDCVLRARNEKEKQECEKLLTPEARKLLEESKKSVKAYLDCVSKAKNEAERKECEKLLTPEARKLLEEAKESVKAYKDCVSRARNEKEKQECEKLLTPEARKLLEESKKSVKAYLDCVSKAKNEAERKECEKLLTPEARKLLEEAKESVKAYKDCVSRARNEKEKQECEKLLTPEAKKLLENQALDCLKNAKTEAEKKRCVKDLPKDLQKKVLAKESVRVYLDCVSKAKNEAERKECEKLLTPEARKLLEEAKESVKAYKDCVSRARNEKEKQECEKLLTPEARKLLEQEVKKSVKAYLDCVSRARNEKEKQECEKLLTPEARKLLENQALDCLKNAKTEAEKKRCVKDLPKDLQKKVLAKESVKAYLDCVSRARNEKEKKECEKLLTPEARKLLEESKKSVKAYLDCVSKAKNEAEKKECEKLLTPEARKLLEEAKESVKAYKDCVSRARNEKEKQECEKLLTPEARKLLEQEVKKSVKAYLDCVSRARNEKEKQECEKLLTPEARKFLEKQRQQKDKAIKDCLKNADPNDRAAIMKCLDGLSDEEKLKYLQEAREKAVLDCLKTARTDEEKRKCQNLYSDLIQEIQNKKAQNKQNQLSKTERLHQASECLDNLDDPTDQEAIEQCLEGLSDSERALILGIKRQADEVDRIYSDLRSRKTFDNMAAKGYPLLPMDFKNGGDIATINATNVDADKIASDNPIYASIEPDITKQYETEKTIKDKSLEAKLAKALGGDKKDDDKEKGKKPTAETKAESNKIDKDVAETAKNISEIALKNKKEKSGDFVDENGNPIDDKKKEEKQDETSPVKQAFIGKSDPTFVLAQYTPIEITLTSKVDATLTGIVSGVVAKDVWNMNGTMILLDKGTKVYGNYQSVKGGTPIMTRLMIVFTKAITPDGVIIPLANAQAAGMLGEAGVDGYVNNHFMKRIGFAVIASVVNSFLQTAPIIALDKLIGLGKGRSERTPEFNYALGQAINGSMQSSAQMSNQILGQLMNIPPSFYKNEGDSIKILTMDDIDFSGVYDVKITNKSVVDEIIKQSTKTLSREHEEITTSPKGGN

SEQ ID NO: 421 - protein, 239 aa, Triticum aestivum
KDNVLNSPLVPTPPSLSNPTPTPETSPVLILVLFHPGRKPNEPNAAPPVAAVRGPALPHWPGQRAAAMAHAGTSVHTDTLLILAAVLCFLLCVVGLAMVARCSRLCNPSAFSVDAPGAVGAPCKGIKKKALQALPTVSWRPQQRKEANEEEGERPECAICLAEFAPGNEVRVLPTCGHDFHAACVDVWLLSNSTCPSCRRALILIVAAAQSPAANESPTPQTCCERADAVAAAQASVVW

SEQ ID NO: 422 - protein, 79 aa, Glycine max
  misc_feature (30)..(30): Xaa can be any naturally occurring amino acid
GSKGAGVHFPTTTVSTVRGNPTEREPMGEXTAPAQACSKGFITAKEDAETSRRNLKLSKDQSMVLEKSFKDHNILNPVG

SEQ ID NO: 423 - protein, 728 aa, Zea mays
LSRPGWLSIIFASDSIAARRLQSSKQTFAVRIFLRGRAEGAMAPVSLPPGFRFHPTDEELIICYLKRKINGRQIELEIIPEVDLYKCEPWDLPEKSFLPSKDLEWYFFSPRDRKYPNGSRTNRATKSGYWKATGKDRKVNSHRRAVGMKKTLVYYRGRAPHGSRTDWVMHEYRLDERECETDTGLQDAYALCRVFKKTAPGPKIIEHYGAVHHPIEQTQWMGSSVERSPTLDLSSDVRGDDFDSSSFSFPTEAPMDSSMHGGLFGMQMSAPHEDAKWMQFLSEDAFNATNPFFTNPASSSFSCLPSKVDVALECARLQHRLSLPPLEVEDFPHDVSLDTKASVLRSSNPNNEVDILQEFLSVASASQELINGTSSSYAAEMWAGAGTSSTSDTHYVNELSSLFEFGVKAKEEADNFYHMDCIGTSSGFSPKPVRVDEPVRLVEIADMEEFKEEKRRVENLRGVRLHNNDDLGEIPTDCCITQYPISDTADISGEAGHLTNPTSAGGLDTAPIFSQSQPDDFAIGFSDDADPNASFDLCERVDVKHGLFVSTVGAPKTFFHHVEPSKKVSFHLNNNPVASDDDVSKATTGKSRSPIISVMTTKDSGSSFSVFSKLKALIRDKFLVKKLPSSCQRSLLGSKETAAVSELLQMVVSSLLLTPTEVTGPTTEQEKLARKAMKPGPRRCDGSHAWLLPLPKRSKGISSMFFSGKWAFLTSALAIRAPGPGCNH

SEQ ID NO: 424 - protein, 294 aa, Oryza sativa (japonica cultivar-group)
MTSNNSTNEELGGGGRKAADKPSGGGGAAAAVASSRHWSASTESRIVRVSRVFGGKDRHSKVRTVKGLRDRRVRLSVPTAIQLYDLQDRLGLSQPSKVVDWLINAAQAEIDKLPPLQFPPHDHDLVAAAASSMAPPPFANGGDGHHGASASSMLEDGDKAAGGGGMKAFMSLSNSLGLLNAATMPATLAAHHHHHHHAAAYYAAAESWGNGGNGGHHHDVSHGVSPSAHNSPFPSLLSLAPGSHHQFVFYSPEGGGFAVKEAAAEQFPVDSLDHSQGQLTLSSARSFLHSGSQG

SEQ ID NO: 425 - protein, 247 aa, Oryza sativa (japonica cultivar-group)
MEQLFVDDPAFASSMSSLEADIFSGAGQLPSSPWLDLDLDDDVQDLSMAPTTANAVSSGYGSGGSGSHRKLSHNAYERDRRKQLNELYSSLRALLPDADHTKLSIPTTVSRVLKYIPELQKQVENLERKKKELTTTSTTNCKPGVLGSQLMSEGMAPIVSATCINDMEIMVQVSLLSNVAGSVLPLSKCIKVLENEGLHFISSSTSSGFGNRTFYSIHLQRSEGTINEECPAFCERLEKVVRNKAKL

SEQ ID NO: 426 - protein, 211 aa, Brassica napus
MASSQWTRSEDKMFEQALVLFPEGSPNRWERIADQLNKSAGEVREHYEALVHDVLEIDSGRVDVPDYMDDSAAGWDSAGQISFGSKHGEGERKRGTPWSENEHKLFLIGLKRYGKGDWRSISRNVVVTRTPTQVASHAQKYFLRQNSVKKERKRSSIHDITTVDTNLAMPGSNMDWTGQQESSQHQQQQSMSEFGQELTPGGHYQEFGYRM

SEQ ID NO: 427 - protein, 246 aa, Helianthus annuus
QHVPGPSLARQSSINLAQDLRKKTVDEVWQGIQQGKNKGSNNSSGSGNNDGDKRGNRERQPTLGEMTLEDFLLKAGVVTGSGKKNVDVNQENANHQQAQWMQYQVAPIPQQHVYMSGHHPVQQSLSIGANPMMDMVYPETQMAMSPSHLMHNLSDTQTPGRKRVASGDVIEKTVERRQKRMIKNRESAARSRARKQAYTHELENKISRLEEENELLKRQKEVGMVLPSAPPPKPKYQLRRTSSASF

SEQ ID NO: 428 - protein, 306 aa, Zea mays
MEGNVAAGKRSRTETANGAAGGGKRSKDMESFQTGLSSKSKPCNKFFSTIGCPFGEGCRFLHFVPGGYPAVAKMLNLGSPAVSAPSRTHVDHAALTGTSHSASSGKTRMCTKYNTTEGCRFGDKCHFAHSERELGKPAYMPYGEPPMGGRFGGRPEPVQPAAMGPPAGNFGASATAKISVDASLAGGIIGKGGVNTKQISRVTGVKLCIRDHESSPNLKNIELEGNFDQIKQAGEMVRDLIATISTSMPAKNSSAAVAPAGGRGGGLGSKSNYKTKLCENFAKGACTFGERCHFAHGENEQRSGAV

SEQ ID NO: 429 - protein, 380 aa, Nicotiana tabacum
MSDKLPTSINLYEEQESMDQHSNHMIIEVATPNAHLQQPQQILLPGISGGDTTSSGGEDNNNNVKLAPKKRAETWVQEETRALISLRRELDSLFNTSKSNKHLWDQISLKMREKGFDRSPTMCTDKWRNLLKEFKKAKHNQEPNGSAKMSYHKEIEEILKARNKNYKNPTLKVDTFMQFSQKGLDDTSITFGPVEENGRPTLNLERQLDHDGHPLAITAADAVTASGSPWNWRETPGNGEQSNSAEGRVISVKWGDYTKRIGIDGTADAIKQAIKSAFRLRTERAFWLEDEQNIVRALDRDMPLGSYSLHVDEGLTIKVCMYEEADHSSVHTEDKTFYTANDFRDFLSHRGWTCLREYNGYRHVDMLDELCPGAVYRGVN

SEQ ID NO: 430 - protein, 402 aa, Zea mays
MLASFSLSFSFSFSWPLFNSAPSSLEKTSLAFHITSDHRQGSVGARARPTAGWGFSLLLAPGYPGMAKQSCCHKKKLRRGLWSPEEDEKLMNHIAKYGHGCWSSVPKLAGLDRCGKSCRLRWINYLRPDLKRGTFSQEEEDLIIHLHSLLGNKWSQIAAQLPGRTDNEVKNFWNSYIKKRLRERGIDPATHQPLAEPAAATAAAAVTTTTTVSRRSVFGDVDLIPTTATTTIHQAPPPSFEGGSMLDGVKLAVELDWPVAGDGVTSRPCYLQGGCFDMDALQQHCGSMSIPPAPVVPSASASSSTLTSMAEAEHCSTNNVAAGGNLPWLDLGANAVAGAGGHVVGSCYAGALDELRWLEYFDSAFQAAESQQGALQPGQCVYGGKDDVPVHFDVHGGLSNWC

SEQ ID NO: 431 - protein, 246 aa, Oryza sativa (japonica cultivar-group)
MGRGKVQLKRIENKINRQVTFSKRRSGLLKKANEISVLCDAEVALIIFSTKGKLYEYATDSCMDKILERYERYSYAEKVLISAESDTQGNWCHEYRKLKAKVETIQKCQKHLMGEDLESLNLKELQQLEQQLENSLKHIRSRKSQLMLESINELQRKEKSLQEENKVLQKELVEKQKVQKQQVQWDQTQPQTSSSSSSFMMREALPTTNISNYPAAAGERIEDVAAGQPQHVRIGLPPWMLSHING

SEQ ID NO: 432 - protein, 222 aa, Glycine max
  misc_feature (44)..(44): Xaa can be any naturally occurring amino acid
  misc_feature (66)..(66): Xaa can be any naturally occurring amino acid
  misc_feature (120)..(120): Xaa can be any naturally occurring amino acid
LHQQISSPCSVRGDPTRLLRRVRLRWCFQDFPEWHKASDDPNDXYQTYLLNQIEEFDDHCIQCYHXDTTDFKSSSDSHVSDLLWIKYCENTLKSSPSLGNGDNGADQICDISEKLEQAEXQVTHSRYGPLIALMARKNEEESALSKLTRDSANIAVEQVHRVQSQVIQVIMVNFVHQANRARTDPSGPYAMDARRLRLIWPSESIVLSYSLDMSSISSISYQ

SEQ ID NO: 433 - protein, 278 aa, Musa acuminata
MAMSHLSMVEARLPPGFRFHPRDDELVCDYLERKVSGENGNGGMHGWPVIVDVDLNKCEPWELPEMACVGDKEWYFFNLRDRKYATGQRTNRATRSGYWKATGKDRRVARRGMLVGMRKTLVFYRGRAPKGRKTDWVMHEFRIEPSSNPPNFSFEEDWVLCRVSSKTRGVITKPDVKNYDDDTTSSSLPPLRNTYITFDQAPRSLEGFEQVPCFSNFTAQLAAAAPPVGSPDLSYYDNKFSTRPAFDHFPKLNPPNIIQENLESYFGENAVSHMRNPF

SEQ ID NO: 434 - protein, 215 aa, Arabidopsis thaliana
MASSQWTRSEDKMFEQALVLFPEGSPNRWERIADQLHKSAGEVREHYEVLVHDVFEIDSGRVDVPDYMDDSAAAAAGWDSAGQISFGSKHGESERKRGTPWTENEHKLFLIGLKRYGKGDWRSISRNVVVTRTPTQVASHAQKYFLRQNSVKKERKRSSIHDITTVDATLAMPGSNMDWTGQHGSPVQAPQQQQIMSEFGQQLNPGHFEDFGFRM

SEQ ID NO: 435 - protein, 592 aa, Solanum tuberosum
MAGKNSGDNRTRTSVSIFIIAGLCCFFYLLGAWQRSGFGKGDSIAVAVTKTAGGTDESEEVEELKPCDPQYTDYTPCQDQKRAMTFPRENMNYRERHCPPQEEKLHCLIPAPKGYVTPFPWPKSRDYVPYANAPYKSLTVEKAIQNWVQYEGNVFRFPGGGTQFPQGADKYIDQLASVVPIENGTVRTALDTGCGVASWGAYLWKRNVIAMSFAPRDSHEAQVQFALERGVPAVIGVLGTIKMPYPSKAFDMAHCSRCLIPWGAADGILMMEVDRVLRPGGYWVLSGPPINWKVNFKAWQRPKEDLEEEQRKIEEAAKLLCWEKISEKGETAIWQKRKDSASCRSAQENSAARVCKPSDPDSVWYNKMEMCITPNNGNGGDESLKPFPERLYAVPPRIANGLVSGVSVAKYQEDSKKWKKHVSAYKKINKLLDTGRYRNIMDMNAGLGGFAAALHNPKFWVMNVMPTIAEKNTLGVIFERGLIGIYHDWCEAFSTYPRTYDLIHASGLFSLYKDKCEFEDILLEMDRILRPEGAVILRDNVDVLIKVKKIIGGMRWNFKLMDHEDGPLVPEKILVAVKQYWTLGDTNSTSSQ

SEQ ID NO: 436 - protein, 208 aa, Oryza sativa (japonica cultivar-group)
MAMQVAAPSRRRPSLGRQKIEIRRIESEEARQVCFSKRRAGFFKKASELSILCSADVAAVVFSPAGKAYSFGHPSVECLLERFLPDSSSGAAARVRRGANNNGGGGMVGELNRQYGELRAMVEAHKARRERADEKIEMERAAGRWLPMDADVRRMSPEELMAFGTGLMAVQAAVSARADQMLRDALLIGRRPPTTTTAGFGFFHMPHY

SEQ ID NO: 437 - protein, 273 aa, Brassica napus
MDGDEDFYSGNEFADNDSDYADSVDADYEFVEDDVDDSDDLLFRRRQQNYSVLSEEDICKLQEEDISRVSSVLSISTISSAILLRHYNWCVSRVHDEWFADEETVRHAVGLLDKPLVHFVSDAEAELTCGICFETYLSDKLHAAACGHPFCDSCWEGYISTAINDGPGCLMLRCPDPSCNAAIGQDMINALAPEKDRQKYTSYFVRSYVEDNRKTKWCPAPGCDYAVSFVVGSGNYDVNCRCCYSFCWNCAEEAHRPVDCDTVSKWIMKNSAE

SEQ ID NO: 438 - protein, 256 aa, Oryza sativa (japonica cultivar-group)
MASPEGSTWVFDCPLMDDLAAAAGFDAAPAGGFYWTTPAPPQAALQPPPPQQQPVAPATAAPNACAEINGSVDCEHGKEQPTNKRPRSESGTRPSSKACREKVRRDKLNERFLELGAVLEPGKTPKMDKSSILNDAIRVMAELRSEAQKLKESNESLQEKIKELKAEKNELRDEKQKLKAEKESLEQQIKFLNARPSFVPHPPVIPASAFTAPQGQAAGQKLMMPVIGYPGFPMWQFMPPSDVDTTDDTKSCPPVA

SEQ ID NO: 439 - protein, 466 aa, Ostreococcus tauri
MASALAPKRRRVATENALTKLSGGEECALFNCAYCQKNISNVVRIRCAVCSNFELCVECFSVGAERQQHKAYHDYHVIDNMSFPLFTRDWGADEELLLLEAVEMFGLGNWTEVSEHVGTKTKTQCHAHYFEVYVKSPSAPLPDMSKILGKGVPRMTEEELKAELEQQANENKDKADEERAVLESLANPNAVKTEGNVQELTGYNVKRNEFDPEYDMDAELPLAEMEFRENDTEEDVQMKLRMIEIYNSRLQERARRKQFILERNLLNVKKQQNLEKKRSQYERDLHGTMRVFARFLSPTDYEMLLEGLAAEHRLRSRITELKEWRRNGIHTIAEGEDYDLEKRRRETEFARLRAIEHPTSKNIARANKFIIRDATQINEQLARIADEEKTSAIPTPRTPSTGTRRRMYLALDLTDLPGVDLLSEDEKELCTSCRLLPVHYLAMKLELMREGLKSETPLTRNRVRTM

SEQ ID NO: 440 - protein, 259 aa, Triticum aestivum
MAPSSPAAAAVAEGDEQQQQQIVAAAAAAKKGGGKRGRREMRRIEDATSRQVTFSKRRSGLLKKAFELGVLCDAEVALIVFSPRGRLYEYASAPDLQKTIDRYLNHTKGTSANEKTVEQPAAGVQMCRSEATALKHKIDAIEAYQRKLSGEGLGSCSAHELQELELQLEKSLSCIRQKKQQKMLDKILELKEKERKLLTENVVLREEYKALPLLELATAAAAERSPDGAGAEEAEEDERRLHYMEVETELVIGRPGSSS

SEQ ID NO: 441 - protein, 115 aa, Triticum aestivum
ELRSEAQKLKESNESLQEKIKELKAEKNELRDEKQKLKAEKESLEQQIKFLNARPSFVPHPPVIPASAFTAPQGQAAGQKMMMPVIGYPGFPMWQFMPPSDVDTTDDTKSCPPVA

SEQ ID NO: 442 - protein, 224 aa, Solanum lycopersicum
MSSPLEIDTSFSHSNLLFLEDESSWSNTHDPFVDIDEYLPIIIPCNDEEIVVESSNASTTTTTTTTSKVASIQNIHHDQEEVTSIEKKHEDDQEKHYIGVRKRPWGKYASEIRDSTRNGIRVWLGTFDTAEEAALAYDQAALSMRGPWSLLNFPMEHVKKSLENIEYSCKDGLSPAAVLKATHKTRRVKHKRSSRKKKNENLENVFVFQDLGVELLEELLMTSS

SEQ ID NO: 443 - protein, 255 aa, Petunia integrifolia subsp. inflata
MSTSNASTSGVRKGAWTEEEDLLLRECIEKYGEGKWHLVPVRAGLNRCRKSCRLRWLNYLRPHIKRGDFSLDEVDLILRLHKLLGNRWSLIAGRLPGRTANDVKNYWNTHLRKKLIAPHDQKQESKNKAMKITENNIIKPRPRTFSRPAMNHVSCWNGKSCSKNTIDKNEGDTEIIKFSDEKQKPEESIDDGLQWWANLLANNIEIEELVSYNSPTLLHEETAPSVNAESSLTQEGGSGLSDFSVDIDDIWDLLS

SEQ ID NO: 444 - protein, 255 aa, Petunia integrifolia
MSTSNASTSGVRKGAWTEEEDLLLRECIEKYGEGKWHLVPVRAGLNRCRKSCRLRWLNYLRPHIKRGDFSLDEVDLILRLHKLLGNRWSLIAGRLPGRTANDVKNYWNTHLRKKLIAPHDQKQESKNKAMKITENNIIKPRPRTFSRPAMNHVSCWNGKSCSKNTIDKNEGDTEIIKFSDEKQKPEESIDDGLQWWANLLANNIEIEELVSYNSPTLLHEETAPSVNAESSLTQGGRSGLSDFSVDIDDIWDLLS

SEQ ID NO: 445 - protein, 212 aa, Oryza sativa (indica cultivar-group)
MPLPPPLQLPCHPKLLQMPFDQEDQRGIHGVMLSSDHCGLYPLPALPLSNSAAAAAATVALGKHSAAAGSMPNIGGAEEVATTVTKAGNESTTCNGSTTWWRGSTMAAAGEKGKMKIRRKMREPRFCFQTRSEVDVLDDGYKWRKYGQKVVKNSLHPRSYFRCTHSNCRVKKRVERLSTDCRMVITTYEGRHTHSPCDDNSSGEHTNCFSSF

SEQ ID NO: 446 - protein, 254 aa, Petunia integrifolia
MSTSNASSSGVRKGAWTEEEDLLLRECIEKYGEGKWHLVPVRAGLNRCRKSCRLRWLNYLRPHIKRGDFSLDEVDLILRLHKLLGNRWSLIAGRLPGRTANDVKNYWNTHLRKKLIAPHDQKQESKNKAMKITENNIIKPRPRTFSRPAMNHVSCWNGKSCSKNTIDKNEGDTEIIKFSDEKQKPEESIDDGLQWWANLLANNIEIEELVSYNSPTLLHEETAPSVNAESSLTQGGSGLSDFSVDIDDIWDLLN

SEQ ID NO: 447 - protein, 359 aa, Nicotiana tabacum
MGICDPIHQLGMWDDFNSSFPSTSATMILEVDKCLEDQIPIMEKRLDNETEDTSHGTVGTSNRYEPETSKPVEKVLRRLAQNREAARKSRLRKKAYVQQLENSKLKLIQLEQELERARKQGMCVGGGVDASQLSYSGTASSGTAVFDMEYGHWVEEQTRQTNDLRIALHSQIGEAELRIIVDGYLNHYFDLFRMKATAAKADVLYIMSGMWKTSAERFFMWIGGFRPSELLKVLTPHLELLTEQQLREVCNLTQSCQQAEDALSQGMVKLHQILAEAVAAGRLGEGNYTLPQMGPAIEKLEDLVRFVNQADHLRQETLQQMSRILNTCQAAQGLLALGEYFERLRVLSSQWATRLREPT

SEQ ID NO: 448 - protein, 179 aa, Solanum lycopersicum
MASFGGTTQKCKACEKTVYLVDQLTADNKVYHKACFRCHHCKGTLKLSNYNSFEGVLYCRPHFDQLFKMTGSLDKSFEGAPKTVRERSADQGSNSKVSSLFGGTQDKCVACKKTVYPLEKVAVDGTSYHRPCFKCSHGGCVISPSNYVAHEHRLYCRHHHTQLFKERGNFSQMEDHEKN

SEQ ID NO: 449 - protein, 321 aa, Medicago truncatula
MGSQGGTVSESKTLPLSRSGSLYNLTLDEVQNHLGNLGKPLGSMNLDELLKSVWSVEAGEVSDFGGSDVAATAGGNMQHNQLGGFNSQESLTLSGDLSKKTVDEVWKDMQGKKRGVDRDRKSREKQQTLGEMTLEDFLVKAGVVGESFHGKESGLLRVDSNEDSRQKVSHGLHWMQYPVHSVQQQQHQYEKHTMPGFAAVHAIQQPFQVAGNQALDAAISPSSLMGTLSDTQTLGRKRVASGIVVEKTVERRQKRMIKNRESAARSRARRQAYTQELELKVSRLEEENERLRRQNEMEKEVPTAPPPEPKNQLRRTNSASF

SEQ ID NO: 450 - protein, 390 aa, Triticum aestivum
  misc_feature (135)..(135): Xaa can be any naturally occurring amino acid
MEGRAGGGGSGDYITSLLTSSPMLDFGVLDGAVAAGGDCLDKFCGDPGFAERAARLSSFNGQHFAPGLFGMPPPAPGAGNGEFGGSREASSVSDPASAMKDANAKKRKAPAGKGKAKEPSLSTSCQVGEQKEADXGKRCRTGDAEKKVKPKAEQAGSDSSVEDGEQRKGGKGKNAKPAEPPKDYVHVRARRGQATDSHSLAERVRRERISQRMKFLQDLVPGCNKVIGKALMLDEIINYVQSLQRQVEFLSMKLATVNPLDFSNLPTLLHKDMYGPSASSVFSLESSSSAFPFSDQGDVFQSFLPSSMESQCTLNQLDLALSQATNAAAQYAFQDGTATASTNLQQQRNFWEDDLQSVFHVDTNRQSQDNGVSAESFHGDLQAGQMKMEF

SEQ ID NO: 451 - protein, 296 aa, Glycine max
  misc_feature (119)..(119): Xaa can be any naturally occurring amino acid
  misc_feature (134)..(134): Xaa can be any naturally occurring amino acid
MDIRKRGRPEPGFSLNGGFKKSKQEMESLSTGVGSKSKPCTKFFSTAGCPFGEGCHFLHYVPGGYNAVAHMMNLTPAAPPPPSRNVAALPHVPNGSAPSAVKTRICNKFNTAEGLQIWXAKCHFAHGEWELGKXLLHHLMIINAMGPPGAGRLAGRMEPPGPAASFGANSTAKISVEASLAGAIIGKGGVNSKQICRQTGAKLSIREHESDPNLRNIELEGSFEQIKEASNMVKDLLLTLQMSAPPKTTPGVPGAPASHGSNFKTKLCENFAKGSCTFGDRCHFAHGASELRKSGV

SEQ ID NO: 452 - protein, 274 aa, Arabidopsis thaliana
MGFDDTCNTGLVLGLGPSPIPNNYNSTIRQSSVYKLEPSLTLCLSGDPSVTVVTGADQLCRQTSSHSGVSSFSSGRVVKRERDGGEESPEEEEMTERVISDYHEDEEGISARKKLRLTKQQSALLEESFKDHSTLNPKQKQVLARQLNLRPRQVEVWFQNRRARTKLKQTEVDCEFLKKCCETLADENIRLQKEIQELKTLKLTQPFYMHMPASTLTKCPSCERIGGGGGGNGGGGGGSGATAVIVDGSTAKGAFSISSKPHFFNPFTNPSAAC

SEQ ID NO: 453 - protein, 326 aa, Arabidopsis thaliana
MAEENYDSHSSSLDSLKPSVLVIILILLMTLLISVSICFLLRCLNRCSHRSVLPLSSSSSVATVTSDSRRFSGHRVSPETERSSVLDSLPIFKFSSVTRRSSSMNSGDCAVCLSKFESEDQLRLLPLCCHAFHADCIDIWLVSNQTCPLCRSPLFASESDLMKSLAVVGSNNGGGENSFRLEIGSISRRRQTPIPESVEQHRTYSIGSFDYIVDDVDSEISESNFNRGKQEDATTTTATATAVTTNPTSFEASLAADIGNDGSRSWLKDYVDRLSRGISSRAMSFRSSGRFFTGSSRRSEELTVMDLEANHAGEEISELFRWLSGV

SEQ ID NO: 454 - protein, 123 aa, Glycine max
PQPPPASANKGVKKKVLRSLPKVTASAESAVKFADCAICLTEFAAGDEIRVLPQCGHGFHVSCIDAWLRSHSSCPSCRQILVVSRCDKCGGIPAPASSSSAPPLADSGDRLKGREEDANRFLP

SEQ ID NO: 455 - protein, 180 aa, Betula pendula
KVSIIMFSSTDKLHEYISPSTTTKQLFDQYQNTLGTDLWSSHYERNLKKLKELEEVNRSLRREIRQRRGESLNDLNLTELHGLEQEMEVAVKVIRDRKYRVITNRIDTHKKKSRNAEEVQRVLLHELGARNEDPHGLVDNAGDYGSLLGCSNGDSCIFALRQQPNFQPNFNSGSRSERTT

SEQ ID NO: 456 - protein, 265 aa, Triticum aestivum
  misc_feature (224)..(224): Xaa can be any naturally occurring amino acid
GGRLVDPWQLPKMALYGEKEWYFFSPRDRKYPNGSRPNRTAGSGYWKATGADKPVGTPKPLAIKKALVFYAGKAPKGEKTNWIMHEYRLADVDRSARKKNSLRLDDWVLCRIYNKKGGMEKPASVDRKPAAMGGYGGGPGAMVSSPQEQKPVMGMNANGGGGGVQPFPDFAAYYDRPSDSMPRLHADSSCSEQVLSPEFPAGEVQSQPKISEWERSFASGGDPXNPAAGSMLEPTGGFRGDPLLQDILMYWGQAVLGRQRNRSGD

SEQ ID NO: 457 - protein, 254 aa, Triticum aestivum
MGRGRIEIKRIENTTSRQVTSCKRRNGLLKKAYELSVLCDAEVALIVFSSRGRLYEYSNNSVKATIDRYKKAHACGSTSGVPLIEVNAQQYYQQEAARLRHQIQMLQSTNKHLVGDSVGNLSLKELKQLESRLEKGIAKIRARKNELLSSEINYMVKREIELQSDNIDLRTKIAEEEQRMQQVTIARPSAAPELNPFTALDMKCFFPANLFEAAVQAHAQAQAQAQAHAQASLQLNLGYQQLAPPGAGDVAHQF

SEQ ID NO: 458 - protein, 222 aa, Triticum aestivum
MVRGKTQMKRIENPTSRQVTFSKRRGGLLKKAFELSVLCDAEVALVVFSPRGRLYEFTSSSMKNTIERYKTVTKDNMSRQTVQQDMEKIKADAEGLSKKLDALEACKSKLLGQNLEECSIEELQSLEVKIEKSLLGIRAMKTRRFEEQLSTLRQKEMTLRQHNEELYSQCQKEQHLASEAAAPPAPATLAALPAPVTLEEQGQQMVDVETGLFLGLPGTGRP

SEQ ID NO: 459 - protein, 455 aa, Zea mays
MDMNESGETGMEQGNASSGAPVEWHTQFNAAAFSCAPQQVPMMDSAFASAGLWASTSQAMALSDVVGAMSAARGGGFLAPVPGFLPQGLGHFAVDSGFIERAARTSCFSGGGGGVMGASAAAFGAAGQTVNNAFSGSSEALLLDHQKKDVVGEKGEPELGRDDGVLSPEAAGGGDCSSKGTSDSKKRRRPNEVVGGDQVQSANLPSADSANESVHSMDKGEESSPATTTAGAGPGKSRGKGEKEVPESQKEDYIHIRARRGQATNSHSLAERLRREKISERMKLLQDLVPGCSKVTGKAVMLDEIINYVQSLQRQVEFLSMKLATVNPRLDLNIEGLLSKDLLRFPGAPSSSLGFPPEMMHPPQLLQLSQPGRLVQGAAAAGGGMASPDVFRRIMQAQLSAKDDGGGASQMLPHARSFGGVARAAYPSSSSALALGSHDYLRSMSRASQQDGFQI

SEQ ID NO: 460 - protein, 222 aa, Triticum aestivum
MVRGKTQMKRIENPTSRQVTFSKRRGGLLKKAFELSVLCDAEVALVVFSPRGRLYEFASSSMKNTIERYKTVTKDNMSRQTVQQDMEEIKADAEGLSKKLDALEACKSKLLGQNLEECSIEELQSLEVKIEKNLLGIRAMKTRRFEEQLSTLRQKETKLRQDNEELYSQCQKEQHLAPEAAAPPAPATLAALPAPVTLEEQGQQMVDVETDLFLGLPGTGRS

SEQ ID NO: 461 - protein, 246 aa, Glycine max
MYLSEKPRPIDFYKEEGARDMMIEVVSNGDLPPPPPPPPPPMILGESSGEDPEVEIKAPKKRAETWVQDETRSLIGLRREMDALFNTSKSNKHLWEQISAKMREKGFDRSPTMCTDKWRNLLKEFKKAKHQDRGSGSAKMSYYKEIDEILRERSKNVQYKSPTPPPKVDSFMQFADKGIDDTSISFGPVEADAVAASGVPPWNWRETPGNGGESQSCCGRVISVKWGDYTRRIGIDGTPEAIKEAI

SEQ ID NO: 462 - protein, 247 aa, Ipomoea nil
MGRGRVQLKRIENKINRQVTFSKRRTGLLKKAHEISVLCDAEVALIVFSTKGKLFEYATESCMEKILERYERYSYAERQLNSTDQNSQGSWTLEHAKLKARMEVLQRNQRHYEGEDLDSLSLKELQNLERNLIQHSNIRSKRNQLMYESILCSEKDKHCRTKYQLSKKIKEREKEMATQQQQQQEVQWEQPNDDINSSYVVPPPLVHLSSEGEYQGEGEYGETEGTQRQQQNNTSAMPQWMLSHLQG

SEQ ID NO: 463 - protein, 236 aa, Arabidopsis thaliana
MYSSPSSWSSSQESLLWNESCFLDQSSEPQAFFCPNYDYSDDFFSFESPEMMIKEEIQNGDVSNSEEEEKVGIDEERSYRGVRKRPWGKFAAEIRDSTRNGIRVWLGTFDKAEEAALAYDQAAFATKGSLATLNFPVEVVRESLKKMENVNLHDGGSPVMALKRKHSLRNRPRGKKRSSSSSSSSSNSSSCSSSSSTSSTSRSSSKQSVVKQESGTLVVFEDLGAEYLEQLLMSSC

SEQ ID NO: 464 - protein, 364 aa, Medicago truncatula
MAASSSDPPSRHHTYDRKQKSLGLLCTNFLSLYNKDDVRLIGLDDAAAKLGVERRRIYDIVNVLESIGVLARKAKNQYTWKGFAAIPVALQELKEEGLWQNLNSSQEGANEDVKVSDEEDEDELLSQTTGSQGESLSQPTGSQNDNLNPNSAFPRSLKNDRREKSLALLTQNFVKLFVCSNLEMISLDDAARLLLGDAYNSSTMRIPSGLAAKVRRLYDIANVLTSMNLIEKTHTTDTRKPAFRWLGLKGKTLNEASLYNSKQNESRKRAFGNDVTNISFARNRMDLFMGGDFKKQKTMENDSGLCQEDVKQGIKQTSAANYQFGPFAPAFVSKAGSSENKVKQVHDWESLATEHCPQYQNQGN

SEQ ID NO: 465 - protein, 255 aa, Petunia integrifolia
MSTSNASTSGVRKGAWTEEEDLLLRECIDKYGEGKWHLVPVRAGLNRCRKSCRLRWLNYLRPHIKRGDFSLDEVDLILRLHKLLGNRWSLIAGRLPGRTANDVKNYWNTHLRKKLIAPHDQKQESKNKAMKITENNIIKPRPRTFSRPAMNNFSCWNGKRCNKNTIDKNEGDTEIIKFSDENQKREETIDDGLQWWANLLANNIEIEELVSYNSPTLLHEETAPSVNVESSLTQEGGSGLSDFSVDIDDIWDLLG

SEQ ID NO: 466 - protein, 112 aa, Glycine max
CFQYKKIFLATLLQKIVTAKWKTATAEEKKPYEGIYHAGKEAYLQVIAKEKRETDSMRFLEDEQRQRTAMELLEQYMQFKQETEKDGKKNKLHIPFGPFFFLVWLMCFIHVH

SEQ ID NO: 467 - protein, 219 aa, Glycine max
MDSPSSFFNSPSSGFCSESSSPEAFSWEGYLPFNENDPEEMLLYGMIAGATTEEHSGERASSEESAAARKEKSYRGVRRRPWGKFAAEIRDSTRHGMRVWLGTFDSAEAAALAYDQAAFSMRGSAAILNFPAEIVRESLKEMNYAHDDSNNEEGCSPVVALKRKHSLRRKINVRKKKNNNNNSKLQSSTVDNAVVFEDLGPDYLEQLLMSSDHHIPTTF

SEQ ID NO: 468 - protein, 255 aa, Petunia integrifolia
MSTSNASTSGVRKGAWTEEEDLLLRECIDKYGEGKWHLVPVRAGLNRCRKSCRLRWLNYLRPHIKRGDFSLDEVDLILRLHKLLGNRWSLIAGRLPGRTANDVKNYWNTHLRKKLIAPHDQKQESKNKAVKITENNIIKPRPRTFSRPAMNNFSCWNGKSCNKNTIDKNEGDTEIIKFSDENQKREESIDDGLQWWANLLANNIEIEELVSYNSPTLLHEETAPSVNAESSLTQEGGSGLSDFSVDIDDIWDLLG

SEQ ID NO: 469 - protein, 340 aa, Medicago sativa
MELGLSLGDSSKPLIGLMEKHPHQASKELGLGFNTTLSIGPIISTTQRDQLQQQQQEEEKTQRDINNNSNRTENPNPVLHQLDLLPQLSFPWNPPSQNGNLLSTEFGGSSRGLDVNVVPPATVVVMANDEMALSSSRIVQHLLFRRDLCMYSRGGSGGRSLSGSGGNKREFSDGEGYDQRNSSRVSDEDDNCGVGNGNTRKKLRLSKDQSAFLEESFKEHHTLNPKQKLALAKQLNLRPRQVEVWFQNRRARTKLKQTEVDCEYLKRCCETLTEENRRLHKELQELRALKTSNPFNMQLPATTLTMCPSCERVATNSTATSSVTNTSATINGNNNNKINQ

SEQ ID NO: 470 - protein, 255 aa, Petunia integrifolia
MSTSNASTSGVRKGAWTEEEDLLLRECIDKYGEGKWHLVPVRAGLNRCRKSCRLRWLNYLRPHIKRGDFSLDEVDLILRLHKLLGNRWSLIAGRLPGRTANDVKNYWNTHLRKKLIAPHDQKQESKNKAVKITENNIIKPRPRTFSRPAMNNFSCWNGKSCNKNTIDKNEGDTEIIKFSDEKQKPEESIDDGLQWWANLLANNIEIEELVSCNSPTLLHEETAPSVNAESSLTQEGGSGLSDFSVDIDDIWDLLG

SEQ ID NO: 471 - protein, 595 aa, Zea mays
  misc_feature (569)..(569): Xaa can be any naturally occurring amino acid
MDSDVEMNTASDEEVMDNDDYYDYCYSDVGDDGGSNSGSEELVAGDYDEGLEAEGTDEVVSRREQTFVVLNEQVISERQAEDVSKVSAVTLITREEACALLHHYKWNISKLSDEWFADEEKVRHTVGLLLNGNHDPRSRKLVCGICFEGCSSDMMSSAGCAHFYCHECWEGYISAAIGDGPGCLSLRCPDPSCSAMVLQGMINELAKDEDRKKYARFLLRAYVEGSKKTKWCPAPDCTCAVEFLGDENYDVSCNCMFSFCWNCTEEAHRPVNCETVSKWILKNSAESENMNWILANSKPCPKCKRPIEKNQGCMHMTCTPPCKFEFCWLCLGAWSDHGERTGGFYACNRYESAKKEGVYDETDARRERAKNSLERYMHYYERWASNQTSRQKAQADLLKAEKDQIANLTDIFGIPETQLKFIIEAWSQIIECRRVLKWTYAYGYYLDDKIKSEFFEYLQGEAESGLERLHQCAEKDLQNFLPSVKSDSTETTTPTVAEFGEFRVKLAGLTSVTRNYFENLVQALEAGLEDVRATGQAAGTSSTATSSKKGGTKSKKKQHTAPSSDHTDXGWPCERCTFLNPPTVDACSVCEKSRY

SEQ ID NO: 472 - protein, 245 aa, Capsicum annuum
MGRGRVELKRIENKINRQVTFAKRRNGLLKKAYELSVLCDAEVALIIFSNRGKLYEFCSTSSMVKTIEKYQRCSYATLEANQSATDTQNNYHEYLRLKARVELLQRSQRNFLGEDLGTLSTKDLEQLENQLESSLKQIRSRKTQFMLDQLADLQQREQMLAESNRLLRRKLEESTAGFPVRLSWEDGADQAMHQHNRLPHTEGFLQPLGLHSSPPHFGYNPVNTDEVNAAATAHNMNGFIHGWML

SEQ ID NO: 473 - protein, 255 aa, Petunia integrifolia
MSTFNASTSGVRKGAWTEEEDLLLRECIEKYGEGKWHLVPVRAGLNRCRKSCRLRWLNYLRPHIKRGDFSLDEVDLILRLHKLLGNRWSLIAGRLPGRTANDVKNYWNTHLRKKLIAPHDQKQESKNKAMKITENNIIKPRPRTFSRPAMNNFSCWNGKSCNKNTIDKNEGDTEIIKLSDENQKREETIDDGLQWWANLLANNIEIEELVSYNSPTLLHEETAPSVNVESSLTQEGGSGLSDFSVDIDDIWDLLG

SEQ ID NO: 474 - protein, 285 aa, Brassica rapa subsp. chinensis
MDCSSFLDLNTNPFDHNFPAKLPKEEVKVSTSSDLERKQNASELREELNRVNSENKKLTEMLAAVWENYYALHHHLEKLQSRKSPEMDQIEQPTKRRKQDSYELLGFGNGLSGGKTENSSSNEDHHQLLSCKRPVTDSFNKANVSTVYVPSDSSDTSLTVKDGYQWRKYGQKVTRDNPSPRAYFRCSFAPSCPVKKKVQRSAEDPSILVATYEGTHNHLGPNGSEGDVTSQVGSSTVTLDLVHSGQGTMQEVLVRQMASSLTKDSKFTAALAAAISGRLMEQSRT

SEQ ID NO: 475 - protein, 291 aa, Papaver rhoeas
PRDRRVRLSAHTAIQFYDVQDRLGYDRPSKAVDWLIKKAKSAIDELAELPPWHPTATMPTPNTLNPSSKSSEQQQIEEDEEENQLRSRGNQNEQGGFLGSSSKTSRQVGGVEQSGRYMFLQNQQEQQQQHQQNNSFLPPSLDSDSIADTIKSFFPMATSSSSIHFQNYSSPPDLLSRTNSQTQDLRLSLQSFQDPMFHQHHHSQHQQHHHSNPSSEQQHALFSTAFDTSGGGGSTNAWSEQQMQEMGRFQRMIAWNPNTDSSGGNGNGSGSSSGGFMFNSPPQQQQQPQPS

SEQ ID NO: 476 - protein, 192 aa, Arabidopsis thaliana
NRRRKAVIDLNAVPVDQEGTSASVRTLTVPITPSQPAPTMIDVDAIEDDVIESSASAFAEAKSKSRNARRRPLMVDVESGGTTRFPANISNKRRRIPSSESVIDCEHASVNDEVNMSSRVSRSKAPAPPPEEPKFTCPICMCPFTEEMSTKCGHIFCKGCIKMAISRQGKCPTCRKKVTAKELIRVFLPTTR

SEQ ID NO: 477 - protein, 425 aa, Oryza sativa (indica cultivar-group)
MSFRSVIQEVKGEIGAISRRGFRSRPGRVRRVAAAAEEPPDESSAAALVMRESCWTQLPPELLREVLARVEESEGWWPRRRDVVACAGVCRSWRGIVREIVRTPEASGNLTFPISLKQTGGQMAQLVLKADKMQLYSPGPRDAPMKCFIVRNRTTQTYYLYIGLTDALTDDGKFLLAARKCRRTTCTEYLISLDMNDISKRTDSYVGKLRSNFLGTKFTIYDAHPPYAGDVISKGQSARVIGSNHLSPRIPAGNYPVSHISYELNVLGSRGPRRMHCAMDSIPVSAIEQGGTAPTQTEFPLSYHESFTSIPFFKSKSVRANNSTASLLTQNGSKLVLKNKSPRWHEHLQCWCLNFHGRVTVASVKNFQLVASDESNPTNQEHDDVILQFGKVGKDMFTMDYRYPISAFQAFAICLSSFDTKIACE

SEQ ID NO: 478 - protein, 260 aa, Glycine max
  misc_feature (87)..(87): Xaa can be any naturally occurring amino acid
IRLELEPLEPSKHLQLQTNTLHNFAFSLFQCPLLPSPPPLSPPSRSFPSSLPPLPTSSPAPPPPPAPSPSPNSAFHRPLILSPPPAXMPPPPPPSMDTCRECNIAGCLGCNFFPEEKKKQKRAKKKYRGVRQRPWGKWAAEIRDPRRAARVWLGTFGTAEDAARAYDKAAIEFRGPRAKLNFPLVDESLTLQQSEPERVQTEEEQIKTENLNQGMEMDSFGNKDTEFWDRINEADFHQLMMMMDFAGDSSDSATGNALSS

SEQ ID NO: 479 - protein, 309 aa, Oryza sativa (japonica cultivar-group)
MEGAGAARKRSRPDTANGGAAGGKRSRETESFQTGLSSKLKPCTKFFSTIGCPFGEGCHFSHFVPGGYQAVAKTLNLGNPAVPAPARAPMDHAAGGNSHPASSGKTRMCTKYNTAEGCKFGDKCHFAHGERELGKPAYMSHESAMAPPMGGRYGGRPEPPPPAAMGPPAGNFGASATAKISVDASLAGGIIGKGGVNTKQICRVTGVKLSIRDHESDSNLKNIELEGNFDQIKQASNMVGELIATISPSTPAKKPAGSAAGAAPAGRGGPGGRSNYKTKLCENFVKGTCTFGDRCHFAHGENEQRKGAA

SEQ ID NO: 480 - protein, 475 aa, Picea abies
MSKDCVIVCLSGDDRIHGHADEKGFDPGFKLFGKTIPVRPVEEMKQEEPVSVQQPGAHKEQSPEGEEEVQQETGSSSEDGKDESMNEGKSGGQKTVLKKPDKLLPCPRCQSMDTKFCYYNNYNVNQPRHFCKNCQRYWTAGGTLRNVPVGAGRRKNKHSVAASTISSHYRQVISAASECGLGVRTDDQESGVDQVMIPCAALPASCVRPLKVAGSRIQVVPMDVLDSAASTGTVLNFGSEVRNKIQLGGDSDPSIEKSTMESSSGSGKEAAGHMNPVAPRPQMDPPPNWANGAAGAAYFGGAWSYGWNFGNPAWNAAAALPPGWPGFSWPMVPGSYFGPSPPPPPGWGPGPWVSGPWAAAAVAASNNPTAAAVASNNPTAVDSGSPTLGKRPQSEDGCLWVPKTLRIDDPGEAAKSSIWTTLGLGDKPESAITSGGIFKAFQPKTQGAKDSRKASQALQANPAAFSRSISFHESS

SEQ ID NO: 481 - protein, 317 aa, Triticum aestivum
TPRARLKQMGAPKQKWTAEEEAALKAGIGKHGAGKWRTILKDPEFSNILRYRSNVDLKDKWRNMNVTVNASGTRDKVRTTTTTTPTAKKPRSAPKQESHSTAITTITSDGDDDVIDVKPIIKPIVTFTTGSGNKSLSRLENIILEAVKTLNEPTGSYKTAVANYIEEQYWPPADFDHVLSAKLNELTSSGKLMKVNRKYRIAPSSSFLEGRSSKMLLLDDIKKEPTKVEKVERDGFTAHTKSQVDAELARMRNMSAEEAAAAAARAVAEADAIMAEAEAAVREAEAAEADAVAAQAFAEAAMLTLKNRSSAKLIIRG

SEQ ID NO: 482 - protein, 317 aa, Oryza sativa (japonica cultivar-group)
MGCKSCEKPRPNYRKGLWSPEEDQKLRDYILRHGHGCWSALPANAGLQRNGKSCRLRWINYLRPGLKHGVFSPEEEETVMSLHAALGNKWSRIARHLPGRTDNEVKNYWNSYLKKRVESGGGKTSQGPPTTPASAASSPADSDDSHSLQQKPHEPANSDSSEPAHESSSASADSSCLTVTTDHPPVSRPHAAVTPKVMFADWLDMEYICGQVAAAPGLDAAGFAVVGGAAGDQQQQQQQVMSQDGSVHQADGPSCGVDDSSLQQQQQEGFGGNGGCWDFQEQFDSIDQMQASGGGGGFCDLLSMSDFDLWAELERTA

SEQ ID NO: 483 - protein, 263 aa, Oryza sativa (indica cultivar-group)
MTNAGSTTIDDGYGGVGMEAEGDVEEEMMACGGGGEKKRRLSVEQVRALERSFEVENKLEPERKARLARDLGLQPRQVAVWFQNRRARWKTKQLERDYAALRHSYDSLRLDHDALRRDKDALLAEIKELKAKLGDEEAAASFTSVKEEPAASDGPPAAGFGSSDSDSSAVLNDVDAAGAAPAATDALAPEACTFLGAPPAAGAGAGAAAAASHEEVFFHGNFLKVEEDETGFLDDDEPCGGFFADDQPPPLSSWWAEPTEHWN

SEQ ID NO: 484 - protein, 428 aa, Arabidopsis thaliana
MENFVDENGFASLNQNIFTRDQEHMKEEDFPFEVVDQSKPTSFLQDFHHLDHDHQFDHHHHHGSSSSHPLLSVQTTSSCINNAPFEHCSYQENMVDFYETKPNLMNHHHFQAVENSYFTRNHHHHQEINLVDEHDDPMDLEQNNMMMMRMIPFDYPPTETFKPMNFVMPDEISCVSADNDCYRATSFNKTKPFLTRKLSSSSSSSSWKETKKSTLVKGQWTAEEDRVLIQLVEKYGLRKWSHIAQVLPGRIGKQCRERWHNHLRPDIKKETWSEEEDRVLIEFHKEIGNKWAEIAKRLPGRTENSIKNHWNATKRRQFSKRKCRSKYPRPSLLQDYIKSLNMGALMASSVPARGRRRESNNKKKDVVVAVEEKKKEEEVYGQDRIVPECVFTDDFGFNEKLLEEGCSIDSLLDDIPQPDIDAFVHGLG

SEQ ID NO: 485 - protein, 304 aa, Zea mays
MMRETYMDVLPPVDHIAASRSGGWFPGAARLWTAAENKQFERALAGLDLCRPDWEKVARAIPGRTVREVVSHFKSLQVDVQQIESGLVPMPVYGAGAGSFTLQWDGCYGPADSRHNGYRFGSGGCGRRHHGRTPEQDRKKGVPWTEEEHRLFLLGLKKYGKGDWRNISRNYVQTRTPTQVASHAQKYFIRLNSGGKDKRRSSIHDITTVNLTDDERAPSPSRSSLITTTSQPNAPAPAAAVIGGPFSSAAAAEAKQHQHGAGNLPPNRTSVVPAVYRMDDSQDHGLQCGPLRHQLVASHHSVLF

SEQ ID NO: 486 - protein, 170 aa, Triticum aestivum
MSSLTTISGGAMEELQEVEELVDTRLSLVIGAASRPPTVLALLPATSPENEAAARRKRKGQENGAGGVAATSRQHNKRAKTVHDSSDVDDDGGDAARDGTRKKLKLTVEQAALLEESFRAHNVLSHGEKHDLARQLGLKPRQVEVWFQNRRARTKLKQTELDCELLRPWV

SEQ ID NO: 487 - protein, 405 aa, Arabidopsis thaliana
  misc_feature (154)..(154): Xaa can be any naturally occurring amino acid
MLFYLSTLYKKAGCQFQLTTMEMMSSSSSTTQVVSFRDMGMYEPFQQLSGWESPFKSDINNITSNQNNNQSSSTTLEVDARPEADDNNRVNYTSVYNNSLEAEPSSNNDQDEDRINDKMKRRLAQNREAARKSRLRKKAHVQQLEESRLKLSQXLEQELVRARQQGLCVRNSSDTNYLGPAGNMNSGIAAFEMEYTHWLEEQNRRVSEIRTALQAHIGDIELKMLVDSCLNHYANLFRMKADAAKADVFFLMSGMWRTSTERFFQWIGGFRPSELLNVVMPYVEPLTDQQLLEVRNLQQSSQQAEEALSQGLDKLQQGLVESIAIQIKVVESVNHGAPMASAMENLQALESFVNQADHLRQQTLQQMSKILTTRQAARGLLALGEYFHRMRALSSLWAARPREHT

SEQ ID NO: 488 - protein, 312 aa, Brassica napus
  misc_feature (226)..(226): Xaa can be any naturally occurring amino acid
MTRRCSHCNQNGHNSRTCPNRGVKLFGVRLTEGSIRKSASMGNLSHHSGSGLSGLVSGSPGDGPDHDGYASEDFVPGSSSSRERKKGNPWREEEHRMFLLGLQKLGKGDWRGISRNYVKTRTPTQVASHAQKYFIRQSNVSRRKRRSSLFDIIPDEATDSVPAAPLILETEECESMKSTNSVGVEAPEDSIQTQLQPPPPGSFPVLYPAYFSPFYSFPFPVWPAAXYDTEQVKEETHEILRPTAVHSKAAPINVDQLLGMSKLSLKESSLNGVSEQSLSLKLIGGSVSRQSAFHPNPASGGGSDMNTVIHAV

SEQ ID NO: 489 - protein, 239 aa, Asparagus virgatus
MGRGRVELKRIENKINRQVTFAKRRNGLLKKAYELSVLCDAEVALIIFSNRGKLYEFCSSSSMLKTLERYQKCSYGAPDTSVQIRESQMLQSSHQEYLRLKARVEALQRSQRNLLGEDLGPLSSKELEQLERQLDSSLKQIRSTRTQYMLDQLADLQRREQMLCEANRSLRKRLEESSQANQQQVWEDANAMGYNRQPNQPQGDQFFHPLECQPTLQIGFQPDQMPGPSVSNYMPGWLA

SEQ ID NO: 490 - protein, 243 aa, Asparagus virgatus
MGRGRVELKRIENKINRQVTFAKRRNGLLKKAYELSVLCDAEVALVVFSTRGKLYEFCSSPSMLKTLDRYQKCSYGAPDTSVQIRENQMLQSSHQEYLKLKARVEALQRSQRNLLGEDLGPLSSKELEQLEKQLDSSLRQIRSTRTQYMLDQLGDLQREEQMLCEANRSLRKRYVQLEETSQTNQRQVWEANANAMGYNRQPSQPQGEEFFHPLECQPTLQIGFQPDQMPGPSASTYMPGWLQ

SEQ ID NO: 491 - protein, 603 aa, Oryza sativa (japonica cultivar-group)
MDTLFRLVSLHHHHHHQHAASPSPPDQPHKSYPSSRGSTSSPSSHHTHNHTYYHHSHSHYNNNSNTNYYYQGGGGGGGGYYYAEEQQPAAYLEECGNGHQFYMDEDFSSSSSSRQFHSGTGAPSSAPVPPPPSATTSSAGGHGLFEAADFSFPQVDISLDFGGSPAVPSSSGAGAGAGAAPSSSGRWAAQLLMECARAVAGRDSQRVQQLMWMLNELASPYGDVDQKLASYFLQGLFARLTTSGPRTLRTLATASDRNASFDSTRRTALKFQELSPWTPFGHVAANGAILESFLEAAAAGAAASSSSSSSSSTPPTRLHILDLSNTFCTQWPTLLEALATRSSDDTPHLSITTVVPTAAPSAAAQRVMREIGQRLEKFARLMGVPFSFRAVHHSGDLADLDLAALDLREGGATAALAVNCVNALRGVARGRDAFVASLRRLEPRVVTVVEEEADLAAPEADASSEADTDAAFVKVFGEGLRFFSAYMDSLEESFPKTSNERLSLERAVGRAIVDLVSCPASQSAERRETAASWARRMRSAGFSPAAFSEDVADDVRSLLRRYKEGWSMRDAGGATDDAAGAAAAGAFLAWKEQPVVWASAWKP

SEQ ID NO: 492 - protein, 257 aa, Triticum aestivum
MEPSSQPQPATGDVVAGGSQVYPASAYPPAATIAVAPGIIPAASQPASPFPANPAQLTAQNQLIYEQAQQFHQQLQQQQQRQLQQFWAERLSEIDQATDFKNHTLPLARIKKIMKADEDVRMISAEAPVVFAKACEIFILELTLRSWMHTEENKRRTLQKNDIAAAITRTDVYDFLVDIIPRDEMREEGVGLPRAGQPPLLGAPADASYPYYYPQQVPGAVMGYGGQQGHLPYVWQDPQEQQQHQGHPGEQQQSESG

SEQ ID NO: 493 - protein, 393 aa, Zea mays
MTRTTRTAPTHQPDLPLLTHTHTHTHTLHASETTRRTAASRSPPPRPGACELALASLPAPTEMDPRFPLPAAAAPSTGGGGGARGHHRRAHSETFLSFHDADLLLDPDGDFFSDLDFPSLSDDSPAASDPTPPPHPQQQPPQASPAPRPPGGTHTRSLSLDAAFFEGLAFQGPSGSAGGGGGPGHKRSGSMDGDTSPFEGESALSSGLPDYAKKAMPAERIAELALIDPKRAKRILANRQSAARSKERKIMYTSELEKKVQTLQTEATTLSAQLTLLQRDTTGLTAENRELKLRLQSMEEQAKLRDALNEALREEVQRLKIAAGQVGNMNGNPFNGGLQQQIPSYFVQQQQMPYFGGHQAQHHSQNQNHRHQISSNVGQTLSGQSLNDSMDFM

SEQ ID NO: 494 - protein, 235 aa, Brassica napus
MVSPENANWISDLIDADYGGFTIQGPGFSWPVHQPLAVSSNSSAGVDGSAGNSEASKEPGSKKRARCESSSATSSKACREKQRRDRLNDKFMELSVILEPGNPPKTDKAAILVDAVRMVTQLRGEAQKLKDTNSGLQEKIKELKTEKNELRDEKQRLKTEKEKLEQQLKAMNAPQPSFFPAPPMMPTAFASAAQGQAPGNKMVPFISYPGVAMWQFMPPASVDTSQDHVLRPPVA

SEQ ID NO: 495 - protein, 195 aa, Ranunculus ficaria
TGIVKKARELTVLCDAQVSLIMFSSTGKLSEYISPTTTRKKVYDMYQKVAEVDLWNSEYERMQKELKKLKETNMELRKEIRQRVGEEIDDLSIDQLRGLEQDLDESVKAVRDRKYHTIATQTETYRKKLRNLHETHTHLVREIEARGEDAYYDGDYEAIMALTNAGAHFLPYGLHPGQPDHHDGDGYALHNLRLA

SEQ ID NO: 496 - protein, 243 aa, Asparagus officinalis
MGRGRVELKRIENKINRQVTFAKRRNGLLKKAYELSVLCDAEVALVVFSTRGKLYEFCSSPSMLKTLDRYQKCSYGAPDTSVQIRENQMLQSSHQEYLKLKARVEALQRSQRNLLGEDLGPLSSKELEQLEKQLDSSLKQIRSTRTQYMLDQLGDLQRKEQMLCEANRSLRKRYAQLEETSQANQQQVWEANANAMGYSRQPSQPQGEEFFHPLECQPTLQIGFQPDQMPGPSASSFMPGWLQ

SEQ ID NO: 497 - protein, 345 aa, Oryza sativa (indica cultivar-group)
MDFSGDIDDLISLQLLHDQLLGVEADACLPVAVHHDGVAAFAEHQQGFHPAAFLPQQPMTMTPAGYVDMANDQYLGAHAAAGEAEAVYRAAAAEPVMIRFGGEVSPVSDPRRPPLTISLPPTSHAWAAAEAVHPAALLQAQAAAAAADPNDFRKYRGVRQRPWGKFAAEIRDPKKRGSRVWLGTYDTAIEAARAYDRAAFRMRGAKAILNFPNEVGSRGADFLAPPPPPPPPTTSTHGKRKRHETAAADPDVEVIGESSKSVKTETYTSPASSSLASTTTSTVTSSSTSPSPSSEAAACGGGGGGELFVPPMPSSWSWDQLEGFFGILSPLSPHPQMGFPEVAVN

SEQ ID NO: 498 - protein, 157 aa, Candida glabrata CBS 138
MSSSQKIDLSTLSPEQLAVVKQQLDQEIQHFSQSLQALNMAKTKFTECIEDVKQVSSISESKKQPILVPGSSSLYIPGEIVESKSFMVDIGTGYYVEKTDEEAIAFYQKKIDKLNTESVQIQNIIKEKSQTSLLLENQIRQAAFTRHEQSKANETKA

SEQ ID NO: 499 - protein, 524 aa, Ustilago maydis 521
MSDLSDEYLHDDDVEDTMDEDSTYGYDDAIDSEEEEEDLGFGVADDAFAAPDSAAERFKSYEVEYKSHTVESIEEAQQKEVEQIASMFMVKDTDAAILLRHFSWNKERLIERYMDSPEKVILEAGVHEDPSRPKLQELDNFTCEVCFMCSDDMPNGKMETLALACGHRYCRDCYQQYLEQKIKSEGESRRVQCMREKCNLVVDEGTVGLVVEPTVFERYKILLNRTYVDDSNILRWCPAPNCELAVECHVSSKMLNKVVPSVACDCGHPFCFGCGNAAHAPAICPIAKMWLKKCEDDSETANWISANTKECPKCTSTIEKNGGCNHMTCRKCKYEWCWICAGPWSEHGNSWYNCNRFDEKSGAEARDSQAKSRASLERYLHYFNRFANHEQSAKLDRDLYGRTEKKMEEMQVTSGLTWIEVQFLKKAVDTLTECRMTLKWTYCMAYYLARDNMTELFEDNQRDLEKAVEDLSEQLEKPIEPRTIPELRQKVTDLTVYVQKRRGILLSDTAEGFQEGRWHWNVTI

SEQ ID NO: 500 - protein, 268 aa, Zea mays
GPYSRPTQRPDRLCDVRTALAMAPPRRPSMGRQKIEIRRIESDEARQVCFSKRRAGLFKKASELSILCGADVAAVVFSPAGKAFSFGHPSVESVVDRFLASSTPSPAGAGAGAGHSSAGGGEDRAVSELNRQHGDLRAQLDAEKARQERADEAIRKEREAGSPAMAWIDADLGAMGHDDLVAFWAALAGVQAAVAASADQLLRDALLVGRRGRQQQQPAAQLGGGGVAFDVGAFGIGVQVPPPPGFAGVDLQGFGGQAAAILGAGGPS

SEQ ID NO: 501 - protein, 628 aa, Zea mays
MANKAVSGARSPLNLVVAMALCCFFYVLGAWQRSGYGKGDRIAAAVSRQTACGDVAAGLSFETHHGGAGAINASSSLPFGADAAPPAFAPCAAALADHTPCHHQDRAMKFPRKNMVYRERHCPSDGERLRCLVPAPPGYVTPFPWPRSRDYVPFANAPYKSLTVEKAVQNWVQYEGAVFRFPGGGTQFPQGADKYIDQLGSVIPFAGGRVRTVLDTGCGVASLGAYLDSRGVIAMSFAPRDSHEAQVQFALERGVPAFIGVLGSVKLPFPPRSFDMAHCSRCLIPWGGNGGMYMMEIDRVLRPGGYWVLSGPPINWKTNHKAWERTEADLSAEQQRIEKYAAMLCWEKVTEIREIAIWRKQLDPSAACPDRPPVRTCDDANSDDVWYKNMETCITPPAAAVAGELQPFPARLTAVPPRISAGAVPGFTAESYEEENRRWERHVAAYKKVNYRLNSERYRNIMDMNAGVGGFAAAIFSPKSWVMNVVPTAAEICTLGVVYERGLIGIYHDWCEAFSTYPRTYDLIHANGIFTLYKDRCRMEDILLEMDRILRPEGTVILRDDVEVLLKVQRTVKGMRWKTLLANHEDGPNVPEKVLFAVKRYWTAAGEGTAAEEKTPGSSSVAGMDSEE

SEQ ID NO: 502 - protein, 187 aa, Zea mays
MPLLLPAKRTTEVTGEDGLRGGSDEEDGGCGIDGSRKKLRLSKDQSAVLEDSFREHPTLNPRQKAALAQQLGLRPRQVEVWFQNRRARTKLKQTEVDCEYLKRCCETLTEENRRLQKEVQELRALKLVSPHLYMHMSPPTTLTMCPSCERVSSSNGNSAAATAAAGARAGAGAGAIVCHPIDRATST

SEQ ID NO: 503 - protein, 382 aa, Glycine max
MASIATFFNKFLYFFILLVHLGCFIFTTAGKQSPPSKKRKTSPLSQPSSPSHTKFKTHKALSSSWHFIKHLFSTKSCKTPNTATTQSSPQSTATTTTTTASAAAASSLISLSQPDPDRNQPVSCPESGISTDTNLFFPLRNDIFPCTACGEIFQKPHLLEAHQTLKHAVSDLPGSDPGHNIVQIIFKSGWPESKPFPTITRILKIHNSPKILSKFEEYREAVKSKAARHGAHTRRRDERCIADGNELMRFHCSTFLCDLGHNGDSAICSQQFCNICGIIKSGFSPKLDGIATLSTSWRAHVAIPEDIEREFRFMNVKRAMLVCRVIAGRVGSDSDEVEKEDGGFDSVMASGESGVYTRLDEEELLVFNPRAVLPCFVIVYSV

SEQ ID NO: 504 - protein, 580 aa, Malus x domestica
MKREHCHSSATASQNNSKPEYSSPPSSALNGKAKIWEDEQGYSGGGDMDELLAVLGYKVRTDDMADVAEKLEQLEMVMGSAQEDGVSQLSDTVHYNPSDLSGWVQNMLSELNTGDDMPSINGPLLAPGESSTITSTSFCNSQRTRVFSDDSEYDLRAIPGVAAYPPAHSSSETESTRKRLKTSIGSNSGGIEVSGAVSDPIRPLVLVDSQETGVQLVHTLMACAEAVQQENLKLADALVKHVGLLAAAQTGAMRKVATYFAEALARRIYRIYPQDCLDSSYSDVLQMHFYETCPYLKFAHFTANQAILEAFATATRVHVIDFGLKQGMQWPALMQALALRPGGPPVFRLTGIGPPQPDNTDVLQQVGWKLAQLAETIGVEFGFRGFVANSLADLEPSMLDIRQDEAVAVNSVFKLHGLLARAGAVDKVLSSIKAMKPKIVTIVEQEANHNGPVFLDRFTEALHYYSSLFDSLEGSSGPSQDLVMSEVYLGRQICNVVACEGGDRVERHETLTQWRGRMDSAGFDPVHLGSNAFKQASMLLDLFAGVDGYRVQENNGSLMLGWHTRPLIVTSAWKLASSTE

SEQ ID NO: 505 - protein, 294 aa, Arabidopsis thaliana
MAKKEKIEQVISMGGIMWEGLNSSLIKVDEALLKQQIREFEKGNDKEWFIITERNKVDQGLSQTKRVGNGAKRQKRVDTNGGYWHATVAAQKINAGDGVVGNKRPLAYYDRKPSEDVKTDWLMQEYSLDHNNDKVRLHFVQDLSYSTSNKEVGEEKKKQKKGEPVEASEGQQPCNAEYHQPLAPLDSCQPQPHDLAEQLDLHQPEQLQLQQPHDIVYQPQYCLLPEQHQLQPFPDNFSELNSFQQQPVMIPDDLEDFLAELMEPHSLDGDEESNNYGFFEGLFDTEGINDKTLH

SEQ ID NO: 506 - protein, 226 aa, Zea mays
RRAGSQDQETERVLIAARGHAQQQPDQQRCIPDPEYSRSASEDEEPHRTPQQGIRATSGTDGSRFTSLPQRRSRSRDMQSQQQLQGSEAVQAPGRKKLKRPAGPSGREEPDDGGGGDDDEPPRRSRNTKDAQTSTSAVRGLLRDFFEQQLRLDAQRQETMERRARERLFFEDQWRQSMQRIEQERLMLEQAWAEREEQRRMREEDRAERRDALLTTLLTRLLQGDL

SEQ ID NO: 507 - protein, 251 aa, Arabidopsis thaliana
MPTLYKKAGCQFQLTTMEWSTTSNVENVRVAFMPPPWPESSSFNSLHSFNFDPYAGNSYTPGDTQTGPVISVPESEKIMNAYRFPNNNNEMIKKKRLTSGQLASLERSFQEEIKLDSDRKVKLSRELGLQPRQIAVWFQNRRARWKAKQLEQLYDSLRQEYDVVSREKQMLHDEVKKLRALLRDQGLIKKQISAGTIKVSGEEDTVEISSVVVAHPRTENMNANQITGGNQVYGQYNNPMLVASSGWPSYP

SEQ ID NO: 508 - protein, 212 aa, Oryza sativa (japonica cultivar-group)
SSSSSSISHGFRPSIIRARSGAMDGEEDSEWMMMDVGGKGGKGGGGGGAADRKKRFSEEQIKSLESMFATQTKLEPRQKLQLARELGLQPRQVAIWFQNKRARWKSKQLEREYSALRDDYDALLCSYESLKKEKLALIKQLEKLAEMLQEPRGKYGDNAGDDARSGGVAGMKKEEFVGAGGAATLYSSAEGGGTSSTEQTCSSTPWWEFESE

SEQ ID NO: 509 - protein, 151 aa, Vitis vinifera
MEGHQILFPGSSKSPANPFPPNMANFHAMNIYKSAGFDASETKEKPGKKEGQKKIRKHRFAFQTRSHVDILDDGYRWRKYGQKAVKNNKFPRSYYRCTYKDCNVKKQVQRLSKDEEIVVTTYEGIHTHPVEKPTENFEHILRQMQSYFPIS

SEQ ID NO: 510 - protein, 233 aa, Populus tremula x Populus alba
MEFEKYFTQGWKSVSSAASDSENPSGCFDCNICFDFAHEPVVTLCGHLYCWPCIYKWLHVQSASLASDEHPQCPVCKADISHTTMVPLYGRGQGSTEAEGKTPYRGMIIPPRPSACGAQGVVSNTSNTGQRLPYRNPYRNHNYNANPYGSFEEASPSPLLNLGDPAMTGLQQPAVGMFREMVYARVFGPFPNSYHLMGTGSPRLRRHELMADKSLNRISIFLFCCFLLCLIVF

SEQ ID NO: 511 - protein, 375 aa, Populus tremula x Populus alba
MGRAPCCEKNGLKRGPWTPDEDQKLIGYIQKHGYGNWRTLPKNAELQRCGKSCRLRWTNYLRPDIKRGRFSFEEEETIIQLHGILGNKWSAIAARLPGRTDNEIKNYWNTHIRKRLLRMGIDPVTHSPRLDLLDLSSILNSPLYDSSRMNMSRILGVQPLGDPELLRLATSLLSSQRDQTQDFAIPNGHQENHLSSPQVHQNQNQSIIHQANQFQPAGQEMPACTALTTTPCVTFSNEAQQMDPNGDQYHLSTITTFSSPNSQVSTHDQWQSNRMGSNLSEDYYVPAVSSYNSADNCRGTDLVDPSSEASTFISNNSNQTFGFASVLSTPSSSPAPLNSNSTYINCSSTEDERDSYCSNFLKFEIPDILDVSNFM

SEQ ID NO: 512 - protein, 92 aa, Medicago truncatula
MASSSMSASGSWSVKENKAFERALAVYDKDTPDRWYNVAHAVGGKTPEEVKKHYELLVEDIKHIESGKVPFPNYKKISVSHEEKRMRNMSLH

SEQ ID NO: 513 - protein, 100 aa, Triticum aestivum
MASLSMSAAGRAGWTPQQNKLFEQALAVHDRDTPDRWHNVARAVGGGKSADDVKRYYELLVHDIARIEAGKVAFPAYRSPCPGPGHNAGYEADRLKHLKI

SEQ ID NO: 514 - protein, 427 aa, Oryza sativa (japonica cultivar-group)
MGRHSCCYKQKLRKGLWSPEEDEKLMNHITKHGHGCWSSVPKLAGLQRCGKSCRLRWINYLRPDLKRGAFSQEEEDLIIELHAVLGNRWSQIAAQLPGRTDNEIKNLWNSCIKKKLRQKGIDPNTHKPLTEADRRGAAPTVSTERTSGSSDVNPSSAGALGNLSHLLSETAQSSMLLPVYDKNHPETASLPRPKVPPKELFLDQLTAGHESPSSCRSSGPTLYFPFQQPLGYSNECGTGDGASMNSLWFNQNDFNCSTISTVMPPVSPSALSTSMGLNLPPENPRHGGTGIGNTPFYWDGSNPSSSGSTGSSGSNSMGFEPQSTTSILENSVFPWTDIGQEKDTRVHLVEELKWPDLLHGTFAEATTAMQNQSQSLYDDVIKAESQFNMEGICASWFQNQQPQQQLQAASDMYDKDLQRLPLSFEHI

SEQ ID NO: 515 - protein, 229 aa, Triticum aestivum
MARGKVQLRRIENPVHRQVIFCKRRAGLLKKARELSVLCDADIGIIIFSAHGKLYDLATTGTMDGLIERYKSASGEGVAADGCGDQRVDPRQEAMVLKQEIDLLQKGLRYIYGNRANEHMNVDELNALERYLEIWMFNIRSAKMQIMIQEIQALKSKILYMQEGMLKAANEILQEKIVEQHGLIDVGMTIADQQNGHFSTVPLLEEITNPLTILSGYSTCRGSEMGYSF

SEQ ID NO: 516 - protein, 704 aa, Nicotiana tabacum
MEQGLRSDGNNPPSIDKTRVLDVKPLRCLAPVFPSPNGMSSVSTPQPSPFVCVPPTGPFPPGVAPFYPFVAPNDSGRPGESSQQTPSGVPNQGGPFGFAQPISPVPLNSFRTPTTANGNSGRSRRAVDDDDYSNSQDQNDQFASGFSVHVNNVEDSGTGKKRGRPKKPRRAQQAEGLTPVEVDVEPLLTQLLTSFKLVDLDQVKKADGDKELAGRVLLVFDLFRRRMTQIDESRDGPGSGRRPDLKASNMLMTKGVRTNQTKRIGNAPGIEVGDIFFFRMELCLVGLHAPTMAGIDYMSVKLTMDEEPLAVSIVSSGGYDDDGGDGDVLIYTGQGGVQRKDGQVFDQKLERGNLALEKSVHRANEVRVIRGVKDVAYPTGKIYIYDGLYKIQESWAEKNKVGCNVFKYKLLRVPGQPEAFKVWKSIQQWKDGVASRVGVILPDLTSGAESQPVCLVNDVDDEKGPAYFTYIPSLKYSKPFVMPRPSPSCHCVGGCQPGDSNCACIQSNGGFLPYSSLGVLLSYKTLIHECGSACSCPPNCRNRMSQGGPKARLEVFKTKNRGWGLRSWDPIRGGGFICEYAGEVIDAGNYSDDNYIFDATRIYAPLEAERDYNDESRKVPFPLVISAKNGGNISRFMNHSCSPNVYWQLVVRQSNNEATYHIAFFAIRHIPPMQELTFDYGMDKADHRRKKCLCGSLNCRGYFY

SEQ ID NO: 517 - protein, 338 aa, Glycine max
NSARARADSARDVFQYINCEDGKMSGPPGDVANSLMDGYSKGNNEVRRRSRFLRRRGRVRRLKYTWKSAAYHSIRKRITERKDQPCRQYNPCGCQTACGKQCPCLQNGTCCEKYCGRPKSCKNRFRGCHCAKSQCRSRQCPCFAADRECDPDVCRNCWVSCGDGTLGIPSQRGDNYECRNMKLLLKQQQRVLLGRSDVSGWGAFLKNSVGKHEYLGEYTGELISHREADKRGKIYDRENSSFLFNLNDQFVLDAYRKGDKLKFANHSPDPNCYAKVIMVAGDHRVGIFAKERICAGEELFYDYRYEPDRAPAWARKPEASGSKKEDGAPSSGRAKKLA

SEQ ID NO: 518 - protein, 250 aa, Arabidopsis thaliana
MGRGRVELKRIENKINRQVTFAKRRNGLLKKAYELSVLCDAEVALIIFSNRGKLYEFCSSSSMLRTLERYQKCNYGAPEPNVPSREALAELSSQQEYLKLKERYDALQRTQRNLLGEDLGPLSTKELESLERQLDSSLKQIRALRTQFMLDQLNDLQSKERMLTETNKTLRLRLADGYQMPLQLNPNQEEVDHYGRHHHQQQQHSQAFFQPLECEPILQIGYQGQQDGMGAGPSVNNYMLGWLPYDTNSI

SEQ ID NO: 519 - protein, 348 aa, Zea mays
MKPMATNGMAPSFFAANFLLQMQQEQQAHHQHQHHEGHDHLLAPPPPALVSPFLHDFGGAMTAPPPPMLATGIKRMYPDGMCDDGSGHLHAEPKQHQQDCGGGASDDEEGSAAAACGERKRRLSVEQVRTLERSFEVANKLEPERKAQLARALGLQPRQVAIWFQNRRARWKTKQLEKDYDALRRQLDAARAENDALLSHNKKLQTEIMALKGGGGGRQEAASELINLNVKETEASCSNRSSDENSSEINLDISRPPRAADESPAAMDSYRGIPFYACARADDVDQLQLLHSGGHPSPAPKMEPGHGAAATAGGGGGGGGTFGSLLCGAAADEQPPFWPWADGHHAFQ

SEQ ID NO: 520 - protein, 256 aa, Brassica oleracea var. botrytis
MGRGRVQLKRIENKINRQVTFSKRRAGLFKKAHEISVLCDAEVALVVFSHKGKLFEYSTDPCMEKILERYERYSYAERQLIAPESDVNTNWSMEYNRLKAKIELLERNQRHYLGEDLQAMSPKELQNLEQQLDTALKHIRSRKNQLMYESINELQRKEKAIQEQNSMLSKQIKERENVLRAQQEQWDEQNHGHNMPPPPPPQQHQIQHPYMLSHQPSPFLNMGGLYQEEDQMAMRRNDLDLSLEPVYNCNLGSFAA

SEQ ID NO: 521 - protein, 350 aa, Oryza sativa (indica cultivar-group)
MDPGRVVFDSGVARRACPGGAQMLLFGGGGSANSGGFFRGVPAAVLGMDESRSSSSAAGAGAKRPFFTTHEELLEEEYYDEQAPEKKRRLTAEQVQMLERSFEEENKLEPERKTELARRLGMAPRQVAVWFQNRRARWKTKQLEHDFDRLKAAYDALAADHHALLSDNDRLRAQVISLTEKLQDKETSPSSATITTAAQEVDQPDEHTEAASTTGFATVDGALAAPPPGHQQPPHKDDLVSSGGTNDDGDGGGAAVVVFDVTEGANDRLSCESAYFADAAEAYERDCAGHYALSSEEEDGGAVSDEGCSFDLPDAAAAAAAMFGAAGVVHHDAADDEEAQLGSWTAWFWS

SEQ ID NO: 522 - protein, 920 aa, Schizosaccharomyces pombe 972h-
MDFNTSTRSKSQPVQRNNYKVLYDPELGIKENLGRKIIYRFNGVSKPPLVVRDPRLKNPIYARGIPKSGRPFLKSLQTINYDYNENSLGPEPPTQVFVSNISPLVTSEQLRYHFKSFGEVFDLDLKLNPYTGTSLGLCCISFDKRSSISVAAHSAKIAVQQANGLRFSGKPLSVVLDRDGSLCEEAFKKALNAVEKQFQEETLQKQRFEREDESSRQKLSAAMNEDIPPWRQPSKNSQTLSNGDLQHSKVQNVDQKSGFLTSSETDVPKNINDYIYLLIDDRFVPPDRVYYTDIKHHFRKFLYEKIYMNKDGFYITFNNYREASNCYRALDRTYVQNCRIKLKFHDIPSRTKEDGKKSAVRRVVLPPEEAYAEATSVVLRDLEAALLRDVKSKIIGPAIFKYLHSMPKPSVKEELQENLLVSSTSVPDVPLKIESTVGKLPSLPKFKKRVDSSKMNLSAGSKTKSKLQRRRRRRHEARPLHYQLNQMYNSSASEAESDQELLLSSGDERVERGKIGSIKSVKSDEATPVFSDTSDENDKFHRFRTKSKISKKKYEKMEVDYTSSSETESDASILSPSAAIPKSGSAIKDELISPKKEIDEVLALAPKWRINEFDETGSVYYGALPYNYPEDDVLLDLDGLQYLVKNDEDYSYLQEALKDEPLMDINDPNFWAYERKSCKFKNGDVKYGDTAILPEPKGYFRSNTSGSAKSEGYYIIPTTEKSLYLPLRNRSTIDTISHSTSRITSRMNRVNNRRLAAGVEKSQLPAEADLLRFNALKARKKQLHFGPSRIHTLGLFAMENIDKNDMVIEYIGEIIRQRVADNREKNYVREGIGDSYLFRIDEDVIVDATKKGNIARFINHSCAPNCIARIIRVEGKRKIVIYADRDIMHGEELTYDYKFPEEADKIPCLCGAPTCRGYLN

SEQ ID NO: 523 - protein, 584 aa, Malus x domestica
MKRDHRDSRATVTARENNSKPEYSSPPSSALNGKAKIWEDDQDGYSAGGDMDELLAVLGYKVRSDDMADVAEKLEQLEMVMGSAQEDGISQLSDTVHYNPSDLSGWVQSMLSELNTGDDMPSIDDPLLAPAESSSITSMSFSNSQRSRVFSDDSEYDLRAIPGVAAYPPAYSPSDSESTRKRLKTSIGSDSNGSSSGAVSDPTRPRVLVDSQETGVRLVHTLMACAEAVQQENLKLADALVKHVGLLAASQTGAMRKVATYFAEALARRIYRIYPQDCLDSSYSDILEMHFYETCPYLKFAHFTANQAILEAFATASRVHVIDFGLKQGMQWPALMQALALRPGGPPAFRLTGIGPPQPDNTDALQQVGWKLAQLAETIGVEFEFRGFVASSLADLTPSMLDIRPSEGEVVAVNSVFELHRLLARPGAVDKVLSSIKAMKPKIVTIVEQEANHNGPVFLDRFTEALHYYSNLFDSLEGSSGPSQDLVMSEVYLGRQICNVMACEGGDRVERHETLSQWRGRMDSAGFDPVHLGSNAFKQASMLLALFAGGDGYRVEENNGSLMLGWHTRPLIATSAWQLASATE

SEQ ID NO: 524 - protein, 297 aa, Triticum aestivum
  misc_feature (96)..(96): Xaa can be any naturally occurring amino acid
  misc_feature (143)..(143): Xaa can be any naturally occurring amino acid
  misc_feature (194)..(194): Xaa can be any naturally occurring amino acid
  misc_feature (209)..(209): Xaa can be any naturally occurring amino acid
MGAEAKCDRIKGPWSPEEDEALRRLVERHGARNWTAIGRGIPGRSGKSCRLRWCNQLSPQVERRPFTAEEDAAILRAHARLGNRWAAIARLLPGRXTDNAVKNHWNSSLKRKLAHRHRRRRGVGRRPTTPGTPRGPCKSPKPXGPGNPPGYRTGGELSHGSGQVFRPVPRPGGFDAISADVRPPPPRQDEDPIXSLSLSLPGLEHGFHXDSARSHFQELSPSPRSPSPPTGPAPQPSSSYPVSGDLVGGIQEMIAPEVCKYMSAVGLPAGWGPGPRARRSSATSQGRNSPPPERFGF

SEQ ID NO: 525 - protein, 248 aa, Ostreococcus tauri
  misc_feature (1)..(2): Xaa can be any naturally occurring amino acid
XXRRTGCARILQHSRVRVRDDCHFLHTYRAGLTLPSRPAPLPYVYAVNAHGMHMNEKVKTRLCRHFQSPEGCRYGERCFFAHGEAELRTEEFNIATGIGMPGCGTGSAFEQCVLVPVPQAHVGTVVGKAGSNIARTSSESGAKVSMLSAEYTNSDGSRLCRVVGTPLDVQKAKDMIEHRLVIARRKKRDDGKSLRDDKSSMKPYKTKICVSWINNGSCTFGDNCHFAHGEVQLQKRFGNDENVESIVL

SEQ ID NO: 526 - protein, 378 aa, Solanum tuberosum
MRVLMEERNDKEKNMDEVMLPGFRFHPTDEELVGFYLRRKVQQKPISIELIKQLDIYKYDPWDLPTELAAVGEKEWYFYCPRDRKYRNSARPNRVTGAGFWKATGRAAKGIKTDWMMHEFRLPSITDSTAPKRFLDKHIPPNDSWAICRIFKKANSNAHRALSHSWVSPPQVLPQNNTTSHDFLTSSHFTNNSNEMSSFIHKTSSTSPIQFNDLLQNSSNNNMSSSFTTLDLPLYKTLNSMSNHNNDPITSYTFSSSCVDNMNNIDASSLLLNMSSSIFGDYSIVLPDNMEGGGVHDDTTTTTLKEANNVIINNMEHMEELQWGNVVRSNNIGVLPLMNNFPLNMAVDAWKTNLLWDSSSPCPSSEMSTSYSTNKCYT

SEQ ID NO: 527 - protein, 277 aa, Oryza sativa
MGVHAMSCHGGGGGGGGGGEGALSRQGSVYSLTLNEVESHLGEPLRSMNLDDLLRTVLPAAAAAAETAGRKTVDEVWRDIQGASTGRHHATPMGEMTLEDFLSRAGVAVDGAASAAGAHWLRGHYPPPPPPTTTTLQYVGGSGAVVDGVYNRVDGHGVAGFLSQVGVAGRKRGGGVDGVVEKTVERRQKRMIKNRESAARSRARKQAYTNELENKISRLEEENQRLREHKAVADFSTFPSCVDFLKAFLTQKLEPVMQIVPQPEPKQQLRRTTSASF

SEQ ID NO: 528 - protein, 686 aa, Oryza sativa (japonica cultivar-group)
MQELNLDLIFRKVSSKLNAFKSQAAVGADVVGERPAARTQPNPTISFPPRPLFFRRGLIVSNATRHDATRRDARKSQKQQQRRSNQAYLHQNLLPPSPLLSTRRFMRGSRMNPGAWQKSGTGRGDSIALRVTKETDCTILPNLHFETHHSLGGVNPLVMTDKVFEPCHIRYSDYTPCQDQNRAMNFPRENMNYRERHCPTETKKLRCLIPAPKGYVTPFPWPKSRDYVPYANAPYKNLTVEKAVQNWVQFEGDVFRFPGGGTMFPNGANAYIDELASVIPFTDGTIRTALDTGCGVASWGAYLMDRNVLTMSFAPRDSHEAQVQFALERGVPAVIGVLGTIKLPYPSGSFDMAHCSRCLISWKSNDAMYMFEVDRVLRPGGYWILSGPPINWKTNHQAWKRSKEDLEAEQNVIEKIAEMLCWGKIHEKGDTVIWRKKADSNECHNKDDHPSKMCKIQDADDVWYKKMEGCITPFPEEAQLRKFPERLFAAPPRILQGRTPGVTEEIFEEDNKLWKKYVSTYKRINKLIGSLRYRNIMDMNAGLGSFAAIIDSPISWVMNVVPTISEKNTLGIIYERGLIGIYHDWCEAFSTYPRTYDLIHANGLFSLYQNKCNMEDILLEMDRILRPEGAVILRDNVEVLNKVRRTVMGMRWKSKLLDHEDGPHIPEKILVSVKKYWVGNEEENSS

SEQ ID NO: 529 - protein, 197 aa, Anemone nemorosa
TGIMKKAEELTILCDAQVSLLMFSTTGKLHEYISPSITQKEFYDKYQQISGVSLWDSQYEKMQDTLKKLKETNSKLRREIRQRHGEDLEGLQFQQLRGLEQNMEKSAERIRNKKFHVIGTQTETCKKKIKSHEETQNNLLRGFDMGDPTCHYGFIPHEDDYDHDNEGSQVFAFRLQPAQHSLQDAEAAYGSYGLTLA

SEQ ID NO: 530 - protein, 260 aa, Brassica napus
MVKAGADLQFPPGFRFHPTDEELVLMYLCRKCASQPIAAPIITELDLYRYDAWDLPDMALYGEKEWYFFSPRDRKYPNGSRPNRAAGTGYWKATGADKPIGRPKPVGIKKALVFYSGKPPRGEKTNWIMHEYRLADVDRSVRKGNSLRLDDWVLCRIYNKKGVIEKRRSEVANGHVMAPVMLNFDKPELIGGGSSCSDQRVVSPEFRCEAKTEPSRWSNALEVPFNYVDAIADNEIVSRLLGGNQMWSTLDPLVVRQRTF

SEQ ID NO: 531 - protein, 228 aa, Brassica napus
MRKGRGSSAIPPALPVTANGSVKEPRYRGVRKRPWGRFAAEIRDPLKKSRVWLGTFDSAVEAARAYDQAARNLRGPKAKTNFPIDCSPSSPLQPLYHQNHQNLRSANQSQIDPFMDHRLYGGGGEQQIISRPASSSMSSTVKSFSGQRPSSSVAKPLPAAKRYPRTPPVAPEDCHSDCDSSSSVIDDGDDIVSSSTRRKPPFQFDLNFSPLDGVDLFDDDLHCTDLRL

SEQ ID NO: 532 - protein, 141 aa, Brassica napus
  misc_feature (91)..(91): Xaa can be any naturally occurring amino acid
VREAEAAVFDMEYTRWLEEQQRLLTELRMATQEHLAENELRMFVDNCLAHYDHLINLKAMVAETDVFHLISGAWKTPAERCFLWMGGFRPXADNLRHQTIHRLNQLLTTRQEARCILAVAEYFHRLQALSSLWLARPRQDG

SEQ ID NO: 533 - protein, 124 aa, Brassica napus
GRRRFTGGNTGRRLIPYENHAKKKRKIFPANHTVSSSSEAIDSDGVVRRCTHCETTKTPQWREGPNGPKTLCNACGVRFRSGRLVPEYRPASSPTFVPSVHSNSHRKIIEMRSREGDQFGKRAV

SEQ ID NO: 534 - protein, 314 aa, Helianthus annuus
MALGFSDRNTEMSPYSQQSNTSAVPMDSSKKRKTRSRKEAPEKVAATLAKWIEYNKANEDGKAKTRKAPAKGSKKGCMKGKGGPENSRTNFRGVRQRTWGKWVAEIREPNRGRRLWLGTFGSAVEAALAYDEAARAMYGTSARLNLPNCRSKNDILPLLVTNPASSCDSTTTCSYSEVDATHDSKPGPAVFPSVKHEESVQVKHEPEIVAKEEHCVDNNDLGFDIGDEMFDLEELLGAVEDSNPEAGSGDGYDGRFVNGADANENMQMYMQPDPCVSGQDYSFDFLQPGRPEDCSFTLEELGLGLDAELDLYSN

SEQ ID NO: 535 - protein, 639 aa, Malus x domestica
MKREHQTHQLNQYPPPQYPDPSMASTSAGGGGGFCKAKMWEDESQRIDGGMDELLAVLGYKVRSSDMAEVAQKLEQLEEFMGCAQEDGLSQLASDTVHYNPADLSTWLESMISEINLPPPNFDPLTGGAVAGMQPNQQQVQLVDDPFLARGESSITTVDFPDQRKSKSISTSPPQTVFEDCNSSSSYYDFKSIPGNAVFTQTRLDSPSRELKRLKSSSGSSPSELLFNRPAASSLPQPQQPISLPATAESSPTRPALIVDSQENGVRLVHGLMACAEAVQQNNFNLAKALVTQIGYLAGSQAGAMRKVATFFAEALAQRIFRVYPQSPIDHSFSDMLQMHFYETCPYLKFAHFTANQAILESLQGKTRVHVIDFSMNQGMQWPALMQALALRPGGPPAFRLTGIGPPASDNSDHLQEVGWKLAQLAETIHVEFEYRGFVANSLADLDASMLELGPSEVESVAVNSVFELHKLLARPGAIEKVLSVVKQMKPEIVTVVEQEANHNGPVFMDRFNESLHYYSTLFDSLEGSANSRDKVMSEVYLGKQICNVVACEGVDRVERHETLAQWRARFGSADFVPVHLGSNAFKQASMLLALFAGGDGYRVEENDGCMMLAWHTRPLIATSAWKPAYNSVMAHRVE

SEQ ID NO: 536 - protein, 250 aa, Crocus sativus
MGRGRVQLKRIENTINRQVTFSKRRAGLLKKANEISVLCDAEVALIIFSTKGKLSEYSTDARMESILERYDRYSSAERAIVAPDPDSQESWRDEYGRLKAKLEALQTSQRHLMGAQLDMLSVKELQQLEQQLENALKNIRTRKNQLMFDSISELQKKEKTLVSQNKDLEKKLIEKEKGKAMAQQGHWDQQGQQYTESSSPPSLLIQDPFPSLTIGINPASGSSEEDYEARPLPPANSNRLPPWMIRSANE

SEQ ID NO: 537 - protein, 611 aa, Oryza sativa
  misc_feature (310)..(310): Xaa can be any naturally occurring amino acid
  misc_feature (319)..(319): Xaa can be any naturally occurring amino acid
MARSSTESRTRTTVSVVVLFGLCSFFYLLGVWQRSGFGRGDSIAAVVNEQTKCVVLPNLNFETHHSASDLPNDTGSTEVKTFEPCDAQYTDYTPCEEQKRAMTFPRDNMIYRERHCPPEKDKLYCLVPAPKGYAAPFHWPKSRDYVHYANIPHKSLTVEKAIQNWVHYEGKVFRFPGGGTQFPQGADKYIDHLASVIPIANGKVRTALDTGCGVASLGAYLLKKNVLTMSFAPRDNHEAQVQFALERGVPAYIGVLGSMKLSFPSRVFDMAHCSRCLIPWSGNDGMYMMEVDRVLRPGGYWVLSGPPIGXKIHYKGWQXTKDDLQSEQRRIEQFAELLCWNKISEKDGIAIWRKRINDKSCPMKQENPKVDKCELAYDNDVWYKKMEVCVTPLPEVKTMTEVAGGQLEPFPQRLDAVPPRITHGFVPGFSVQSYQDDNKLWQKHINAYKKINNLLDTGRYRNIMDMNAGLGSFAAALESTKLWVMNVVPTIADTSTLGVIYERGLIGMYHDWCEGFSTYPRTYDLIHANAVFSLYENKCKFEDILLEMDRILRPEGAVIIRDKVDVLVKVEKIANAMRWQTRLTDHESGPHVPEKILFAVKQYWVVESKSS

SEQ ID NO: 538 - protein, 246 aa, Crocus sativus
MGRGRVQLKRIENTINRQVTFSKRRGGLLKKANEISVLCDVDVALIIFSTKGKLSEYSTDARMETILERYERYSFAESAIAVPEAESQGSWLNEYGRLKARIESLQTSQRHLTGVQLDMLNVKEMQELEQKLESAMKNIRSRKSQLLFNSISDLQTKEKALVDRNNDLKKKIAEKERKRTSAQQGHQDQQGQQYVDPTSPLSFPVQDPPSLTMGINPARSTSDEDRPLPQVNSSKLLPWMIRSVNG

SEQ ID NO: 539 - protein, 147 aa, Medicago truncatula
CLEGAFSGQSYIRNRASQSGRALRTQKNIMKCPTCSTDIADYLQNPQVNREMMGVIESLQQQAEQMEESSEESSVKSDENLKPDEETEVSKPCDSSEKVLKEINKNDLNPPQKRRKGTGGKAVANTEEHIDEVNVGSKAMALNKALN

SEQ ID NO: 540 - protein, 217 aa, Oryza sativa (japonica cultivar-group)
MDDSHDLASPTSPDTASSSSSSTSTSSSSATVAPKKRPRNDGRHPTYRGVRMRSWGKWVSEIREPRKKSRIWLGTFATAEMAARAHDVAALAIKGRTAHLNFPDLAHLLPRPATAAPKDVQAAALLAAAAADFPSVSVDANAKSPDTCSVASAASPQPPPPDAEADPDSTLFDLPDLLLDLRYETSSSLSCGASWAVDDDVAGGVVFRLEEPMLWDY

SEQ ID NO: 541 - protein, 375 aa, Musa acuminata
MAGIGLELRLCASRTVGGFVKQVAAVVESTDRGVAKLEESVRSLEEERRKIDAFKRELPLCMLLLTDVIEGLKKELERCRGQKLANAFEEFIPIRRKCEEEAGVKLEADYEDKKNWMSSAQLWSVNSSENNDEDDKSITDERNGRPDCDAEKESLNLESKNLSAGGAFVQFKGISALAMKPKEEVKPLPDLSLRSPAVKSNSCPVSAVTEHQAGGVSGSKGVGRAPPAMTGAHLSLQVMQQTPRKARRCWSPELHRRFVLALYQLGGVRVATPKQIRELMKVDGLTNDEVKSHLQKYRLHSRKLPNASASFSRPPMVLGGLWVPPENHTVSPQQSDSQSGSPQSSLRLAGCDGTISAAAGASCEEEGKSESCNGR

SEQ ID NO: 542 - protein, 350 aa, Musa acuminata
MEERKNSYPGGLLIDPSSSSPTSPVSSKSRSSSSPSLSSITADHHQQQQQQKNLRCPRCDSTNTKFCYYNNYNLTQPRHFCKTCRRYWTKGGALRNVPIGGGCRKTRAVAAIAAPGLCAKSAGATKTRPASPDLVLRSGLVGGLENELSSTLWPSPHPSHLISLLRSSSVQNPNIFLHSTPSLHLNSAIIDEDKTLLGSHTVADPGGTPNSHSPSLEALSQLALGASPWRNNNNNYSSSYHHHHHHHQQSQPQNDDMLLGVTPSSEIQDLYQKFKSSANYHNEQLQTVMSNVGSFGSSCSPTASLMTMAGTLTNATAPIMDQIPLSAGEFGNWNPGLAWSDLPTLNGAFH

SEQ ID NO: 543 - protein, 1039 aa, Oryza sativa (indica cultivar-group)
MPPPTVPFFLTSTTLAAAAAKPQRPGPPSPPAQQQQPREARDGSRDACASYTARMRLNPQLALRLFDHLLRSGADPDHVAYALALGRCARGRDHRAAAQLHSHAAKRGAASHRRVCNGLIHAYAVCGSLLDARKVFDRGHEGDAVAWNSLLRGYAAAGDVNALREFFVGMQARDTVSWNTIIAWCVENGEYEEAIAVFREMLASMECLPDRVTLFPGKGIEVEERLSSALINMYSKCACIEGAVHVFENLGAQMNVDTWNAMLAGFTANGCSEKALELFARMEITGLVPNKITFNTVLNACSHGGFVEEGMGCFERMTKVYGIEPDIAHYGCMVDLFCRAGLFDKAEKMIQMMPMKPDAAVWKALVGACKTHRNFELGRKAGHMLIEAAPNDHAGYVLLSNIYALDGNWTGVHKVRKLMLDRGVQKVPGSSSIEIDGVIHEFISGDKSHSSKEDIYEMLSEMCQQLKVAGYVPDTSHVLLDIDDEDVKESSLALHSEKLAIAFGLISTAPGTPIRIAKNLRVCGDCHNAVKLLSKIYGRNPLLLLAPDGPLPTARLLEKASSRADKQMPVRVGCVRDANMLCSAGYYYALGIRSLEPRLGDSMDMSESSEKGMESNASSGPGNGIPVEWQSQFSSAFACQPSVAAQHQQHAMMDSFAAASAGLWASSDVVSAMSSAAPPRGAGFLAPVPGFLQQGLGHFPVDSGFIERAARSTCFGGGMMAGGPYGAADQAMGDAFGGTAEGLMDHHRNVGNDKAEEFAGNGHDEVPSSEVAGGDCSSKGSDSKKRRRPNEVMGTDQVHSSNLPSDSANESVHSKDKGEESSPATTNGGKSKGKGAKETYESQKEEYIHVRARRGQATNSHSLAERLRREKISERMKLLQDLVPGCSKVTGKAVMLDEIINYVQSLQRQVEFLSMKLATVNPRLDLNIEGLLSKDLLRFPGVPSSSIGFSPEMMHPQLQLSQPGLIHGGTAGMANPDVFRRIIQAQLGAKDGSQASHQLPNIRIKFSQNHQNSQSISPTSLQIHLRITSDILHSENPVH

SEQ ID NO: 544 - protein, 282 aa, Craterostigma plantagineum
LGLSLGSFGPSSSGGSHPPPALPLPSNLFRPSLQEIDRTQRSIGAFLQAPTAAAVCREPASAFRGIDVNRPPTIVDCGEENNNPIASPSPNSTVCSSSGKRTSGEREEKEDGDRAASSSFEVEDDDGGGGDASARKKLRLSKEQAVVLEETFKEHSTLNPKEKIALAKQLNLMPRQVEVWFQNRRARTKLKQTEVDCEYLRRCCENLTEENRRLQKEVNELRALKLSPQFYMSPPTTLTMCPQCERVAAQPSSAAAIRPPSHHQRPAAGMNSWAAMISPRPS

SEQ ID NO: 545 - protein, 478 aa, Glycine max
MGGTVVAEVPTKRGRGRRALKEKTPSTNDANIIIATPISPSSEKAAQVVPSKKKQDSKKQQSFEKELLEMQEMLQQMRLEKEKTEELLKVKDEALKLKEEELENRGREQEKLQTELKKLQKLKEFKPTMNLPVLKDNEEKKDKKKKGCSEKKRPSPPYILWMKDQWNEIKKANSEAEFKEISTMLGSKWKTVTAEEKKPYEEIYHAEKEAYLQMIAKEKRETEAMRLLEDEQKQKTAMELLEQYMQFKQEAEKEGKKNKKEKDPLKPKHPMSAYFLFTNDRRAALVAENKNFLEVPKITAEEWKNMTEEQKRPYEEMAKKNKEQYALEMEAYKQKKDEEAAHFMKEEEEQMKLQKQEALQLLKKKEKTENIIKKTKQNRQKKKQNKDDKNSDPNRPKKPASSFILFSKEARKTLQEERPGISTSTLNALVSLKWKELSEEDRQFWNGQASKAMDAYKKELEEYNKSLAATACQEQKTE

SEQ ID NO: 546 - protein, 255 aa, Arabidopsis thaliana
MEGGASNEVAESSKKIGRGKIEIKRIENTTNRQVTFCKRRNGLLKKAYELSVLCDAEVALVIFSTRGRLYEYANNSVRGTIERYKKACSDAVNPPTITEANTQYYQQEASKLRRQIRDIQNLNRHILGESLGSLNFKELKNLESRLEKGISRVRSKKHEMLVAEIEYMQKREIELQNDNMYLRSKITERTGLQQQESSVIHQGTVYESGVTSSHQSGQYNRNYIAVNLLEPNQNSSNQDQPPLDLIIYIYLDYVS

SEQ ID NO: 547 - protein, 299 aa, Oryza sativa
  misc_feature (156)..(156): Xaa can be any naturally occurring amino acid
  misc_feature (177)..(177): Xaa can be any naturally occurring amino acid
  misc_feature (222)..(222): Xaa can be any naturally occurring amino acid
MQMESYYGAFHADEAAFFFPHHVPASPELPFGLIASPEPEQAAAEARQSAFQEYGGAVHAGAPAAAGAVTTGGTNIHRRVMDVLGRMGGGGGGGEKGEGEEMEEEEEVPQRRRRGQGADVESSRGFRHMMRERQRREKLSQSYADLYAMVSSRSKXGDKNSIVQSAAIYIHELKVAXDQLQRRNDELKAQIMGHDEQQPCVTVQFEVDEPSSSIDSMIAALXRRLKGMSVKARGIRSSMSGNRLWTEMNVETTHGIAACEVEKAVEEALKEVERNQPDSDAPFPGSKGWTQTSHVQNVF

SEQ ID NO: 548 - protein, 282 aa, Craterostigma plantagineum
MKTQNTSETLGALISICPNTTDEERVSNVETSAMFGLDDECFASEKKRRLSNEQVKALEKYFEVENKLEPERKVKLAQELGLQPRQVAVWFQNRRARSKTKNLERDYGVLKSNYNALKHDFETLKRDNESLLKEIHELKSKLNEDDDSKSVEEEPFVEALELDANSDDVEPDSNQLFGSSDSDSSAILNEDNNNSRSSFLDDHRRKLSKIHGGSSPPSSAKIASEKNGSDESCKRAAAYKPQFVKIEEQHNLFREEDESCTTTFFSDEQAPTLNWYTPDEWN

SEQ ID NO: 549 - protein, 427 aa, Zea mays
MGRHSCCYKQKLRKGLWSPEEDEKLMNHITKHGHGCWSTVPKLAGLQRCGKSCRLRWINYLRPDLKRGAFSEEEEDLIVELHAVLGNRWSQIATRLPGRTDNEIKNLWNSSIKKKLRQKGIDPNTHKPLLVEVERSKAAPTTSTERTSESSDVDPSSGGALGNSSHLLLSETAQSPQLPALGKHRRETTSLAHLRVPPKELFLDQLVSGHENLTGCRTAGPVPNFPFQQLMCYSNEFGNKNGASNNSLWFNHNETSGSTISTVMPPVSPSTLSTSTGLNRSPDNPHSGGTAIQSTQFYWDTANPSSCSSRGSSGSNGLGFELQSTSSLLESSVFPWTELTPDKNSQVHLGEELKWPDLLHGTFTDTPATMQNLSQSLYEDVIKAESQFNIEGLCAAWSQNLQPQQHLQVSDLYDKDLQRMSLSFENI

SEQ ID NO: 550 - protein, 198 aa, Saururus chinensis
NRQVTYSKRRNGLFKKAHELSVLCDAQVSIILIPNTRRHHDYCSPSATHKQVYDRYQQVRGVDLWSTQYEKNKSESFYWRQRMGKDLGHLTYNELRGLEQTVENAVNVIRDRKIKQIQNQIQKYDKKCKSLDDDNDVRLLQLQAIHENCRYYGFMENGGADHRTGFKLANQASHIFAFRGQPCQPNLHDASFRDRDTH

SEQ ID NO: 551 - protein, 292 aa, Oryza sativa (indica cultivar-group)
MQKLTNATKQWQLHSQIVRFYLFLSIPLFVSSAETGSANSEMCTRGFDVNTRPADGGAEAGRPSSPSSMQEASTRQQVADQEAADDEDNGGGGARKKLRLSKEQSSFLEDSFKEHSTLTPKQKSDLANRLNLRPRQVEVWFQNRRARTKLKQTEVDCEHLKRCCERLTRENRRLQREVAELRGALRTTTSSYPPLYGLHHLPAAAGTVFRVCPSCEHSKVVAAAASESFSPRVFAGGGAPAAITAAAAVPSPGAGSPPSSSAALFGARRPHFGPFAAAVIPPVLRRQPSATS

SEQ ID NO: 552 - protein, 329 aa, Coffea canephora
MCGGAILEGLIPPRNNNDGTRRLSSADLWPSAADFWPNSHLAKPSRSNPTDAPHKATHETCHDPHDEAGGKQQVLPKGAKRQRKNLYRGIRQRPWGKWAAEIRDPRKGVRVWLGTFNTAEEAARAYDKEARKIRGKKAKVNFPNEDSTSYPTCIPSQTQYQQVHIPSPPTFCGPSSSNCKFNQLRVGSSDCSASDCYHANSIDDCARFTNMMGFRNPSEEVSGSGSSDNECFLGHLKQVAKAAAEEEAASVITENDTKDNNKAAESEEYQVEKLSEELLAYESFMKFYQIPYIDGQSAAASANPAQELATSIQLWSFDDVSPANRPMPL

SEQ ID NO: 553 - protein, 208 aa, Brassica napus
RTRPNNNNNNNNHVIPPWLATSNNGSNVVARPPSVTLTLSPSVAATPPQQQPIPWLQQQQPEASPGGLVLGSMIPSCSGSNESVFMSELVECCRELEEGHRAWAEHKKEAAWRLRRLELQLESEKTSRQREKTEEIEAKMKALREEQKMAMEKIEGEYREQLVGLRRDAEAKDQKLADQWTSKHIRLTKFLEQHMGRRQRLSRPGLDT

SEQ ID NO: 554 - protein, 281 aa, Oryza sativa (indica cultivar-group)
MRSYMDGGGAAAYEEEEEEVEDDDGGGGGGGGGGGGGLGEKKRRLAAEQVRALERSFEADNKLDPERKARIARDLRLHPRQVAVWFQNRRARWKTKQIERDFAALRSRHDALRLECDALRRDKDALAAEIADLRDRVDGQMSVKLEAVAADEHQPPPPPPPPPLAYNSKVVDGSTDSDSSAVFNEEASPYSGAAIDHHHHQTPASYDTAGFTSFFAPSTTLTSSLSFPSMFHASSHFDGHQELLVGGGGAGAVADADLGGAGFFAGDEHAGGLSWYGAEGW

SEQ ID NO: 555 - protein, 308 aa, Oryza sativa (japonica cultivar-group)
MMDLGLSLGLGLASQGSLTSSTTTTSSPGAGSSSPWAAALNSIVGDVRRDQAAAHAAAAVGVGVGGEEMYQGRASTSPDSAAALSSASGKRERELERSGSGVDDDDGADGAGGRKKLRLSKDQAAVLEECFKTHSTLNPKQKVALANRLGLRPRQVEVWFQNRRARTKLKQTEVDCEYLKRWCERLADENKRLEKELADLRALKAAPSPASASAMQPSSSAAATLTMCPSCRRVATAGAPHQPNHQQCHPKSNTTISSSSTAAAAVAVAGGNVLPSHCQFFPAAAAAADRTSQSTWNAAAPLVTRELF

SEQ ID NO: 556 - protein, 136 aa, Solanum lycopersicum
METNKWEGKRSITEAEKEEDEHGSVEEDSKRKRVLTLSGRKLVGEGSAHPSCQVDQCTADMADAKPYHRRHKVCEFHSKSPIVLISGLQKRFCQQCSRFHLLAEFDDAKRSCRRRLAGHNERRRKITYDSHGENLG

SEQ ID NO: 557 - protein, 379 aa, Solanum lycopersicum
MDSNGTNAATSNNMEKPIQDPSQQQQQQPPPHLKCPRCDSSNTKFCYYNNYSLSQPRHFCKACKRYWTRGGTLRNVPVGGGCRKNKRIKRPSVNSSSSTTTTSHDIITTSTPNIVNPSHHHQLHHGVVHNNIDHLSTTNSQNHLNPLFYGLTHERSDLNIPFARLFNSRVSSHAGGVDPEGQVYSLTDNIPGLMDRRMGLGFSNSSGGVVNMGHENNNNNNNSSSSNYGHGGFNPIKQIQDVHVMSTSNCTTSTTSLLSSYPNMFGSSSSTSTMASLIASSLQQQKFMSNINGNSFHSLLTPNNYEELQMSRGENNNTNINNVHEGGGNGITMLKEEKMDLSNHQIHEQIINSSDPSLSWNGAWLDPSNMGSNSVPSLI

SEQ ID NO: 558 - protein, 183 aa, Oryza sativa (japonica cultivar-group)
MAASSEVSIDPDQWFYIYSLERVAYVCERVGSPVMEEAELRRRRRKRPFLTTTHDELELQMEDLVDELYGVDEQGSSSAAARKRRLTAEQVRALERSFEEEKRKLEPERKSELARRLGIAPRQVAVWFQNRRARWKTKQLELDFDRLRAAHDELLAGRTALAADNESLRSQNSSDSRISDKLA

SEQ ID NO: 559 - protein, 332 aa, Arabidopsis thaliana
MFFRRNSQPFRRATSCSVTLDPQRYSTKHFKRILIVNNVNIDIDLKTGIVTKNMAKKEKIELVIKIVNRTKSMAVEEFEKGNDKEWFIITERNKVDQGLSQTKRVGNGAKRQKRVDTNGGYWHATVAAQKINAGDGVVGNKRPLAYYDRKPSEDVKTDWLMQEYSLDHNNDKVRLHFVQDLSYSTSNKEVGEEKKKQKKGEPVEASEGQQPCNAEYHQPLAPLDSCQPQPHDLAEQLDLHQPEQLQLQQPHDIVYQPQYCLLPEQHQLQPFPDNFSELNSFQQQPVMIPDDLEDFLAELMEPHSLDGDEESNNYGFFEGLFDTEGINDKTLH

SEQ ID NO: 560 - protein, 635 aa, Malus x domestica
MKGEHQIHQLNQYPLPQQHPDPSMASASAGGGFGKAKMWEDESQRMDGGMDELLAVLGYKVRSSDMADVAQKLEQLEEFMSCAQEDGLSQLASDTVHYNPSDLSTWLETMISEINVPPPNFDPLMGGAVAGIQLSQQQVQLVDDPFLAPAESSITTVDFPDHRKSKSMSTSPTQNVFEDCNSSSSYYDFKSIPGNAVFTITRLDSSSREPKRLKSSSGSSPSDLLFNRPAASSLPQPQQPISLPAPAESSSTRPALLVDSQENGVRLVHGLMACAEAVQQNNFNLAKALVTQIGYLAGSQAGAMRKVATFFAEALAHRIFRVYPQPPIDHSFSDMLQMHFYETCPYLKFAHFTANQAILESLQGKTRVHVIDFSMNQGMQWPALMQALALRPGGPPAFRLTGIGPPASDNSDHLQEVGWKLAQLAETIHVEFEYRGFVANSLADLDASMLELRPSEAESVAVNSVFELHKLLARPGAIEKVLSVVKQMKPEILTVVEQEANHNGPVFMDRFNESLHYYSTLFDSLEGSANSQDKVMSEVYLGKQICNVVACEGLDRVERHETLTQWRARFDSADFVPVHLGSNAFKQASMLLALFAGGDGYRVEENDGCLMLGWHTRPLIATSAWKPSFNSVIAH

SEQ ID NO: 561 - protein, 247 aa, Arabidopsis thaliana
MRTLYNKAQCQFRLTTMDQQDHGQSGAMNYGTNPYQTNPMSTTAATVAGGAAQPGQLAFHQIHQQQQQQQLAQQLQAFWENQFKEIEKTTDFKNHSLPLARIKKIMKADEDVRMISAEAPVVFARACEMFILELTLRSWNHTEENKRRTLQKNDIAAAVTRTDIFDFLVDIVPREDLRDEVLGSIPRGTVPEAAAAGYPYGYLPAGTAPIGNPGMVMGNPGGAYPPNPYMGQPMWQQQAPDQPDQEN

SEQ ID NO: 562 - protein, 310 aa, Arabidopsis thaliana
MKLLGQMLYYVLTTGSGQQTLGEEYCDIIQVAGPYGLSPTPARRALFILYQTAVPYIAERISTRAATQAVTFDESDEFFGDSHIHSPRMIDLPSSSQVETSTSVVSRLNDRLMRSWHRAIQRWPVVLPVAREVLQLVLRANLMLFYFEGFYYHISKRASGVRYVFIGKQLNQRPRYQILGVFLLIQLCILAAEGLRRSNLSSITSSIQQASIGSYQTSGGRGLPVLNEEGNLITSEAEKGNWSTSDSTSTEAVGKCTLCLSTRQHPTATPCGHVFCWSCIMEWCNEKQECPLCRTPNTHSSLVCLYHSDF

SEQ ID NO: 563 - protein, 168 aa, Brassica napus
METFCGFQKEEEQMDLPPGFRFHPTDEELISHYLHKKVLDISFSAKAIGEVDLNKSEPWELPWMAKMGEKEWYFFCVRDRKYPTGLRTNRATEAGYWKATGKDKEIYRGKSLVGMKKTLVFYRGRAPKGQKTNWVMHEYRLEGKLSAHNLPKTAKNEWVICRVFQKSA

SEQ ID NO: 564 - protein, 285 aa, Craterostigma plantagineum
MNSARIFFDPSSHGNMLQFLGNAGGDSSVFRGTRSSSVLNMEESSLKRQIFSGGGGDEFYDEEYYDEQLLPEKKRRLTAEQVHLLEKSFEAENKLEPERKAELAKKLGLQPRQVAIWFQNRRARWKTKQLERDYDKLKSSYDSLLSTYDSIRQENDKLKAELLSLNEKLQPKDDDDPSAEIGRNLSSSSPPVDAAEPPCLKLTVKVEDRLSTGSNGSAVMDGDGPQQLLDDSGDSYFENDEEYDCAAASLAAAKEDDGSDEGGCYFTEALAAEEEEAPFAWCIWS

SEQ ID NO: 565 - protein, 230 aa, Zea mays
  misc_feature (133)..(133): Xaa can be any naturally occurring amino acid
MDCGGALQLPPGFRFHPTDDELVMYYLLRKCGGLPLAAPVIAEVDLYKFDPWQLPEKAFGGEKEWYFFSPRDRKYPNGSRPNRAAGTGYWKATGADKPVGSPRPVAIKKALVFYAGKPPKGVKTNWIMHEYRXLADVDRSAAARKKTNNALRLDDWVLCRIYNKKGVIERYDTVDDDDGDGAVAEDVKPVPAPAASKNPRASARIGAAAAAPNEVELPEYGGGYYDYDDL

SEQ ID NO: 566 - protein, 314 aa, Craterostigma plantagineum
MNMEPICGAYDEDDDFLIKNEDDDDPLWLSPQDSSSPTSFHCLQGGSSSSSSMANLPLLPKAGKVRISSGDISSAAAAKKIRRLSADQVRYLEKTFDQDNKLEPERKAKLAKDLGLQPRQVAIWFQNRRARYKTKLLQKDCDVLKSSYDRLKRDYDALFSQNEKLKIEIDSLMGKLQGKEKGRDQLIMKENLEPLGGEDDVKKQSKTSSAKSDVVDCSDSSPRHGDSSHDVFEAAAADAISDYYYGEEEDNDESLGKSSLLLQASSSCFPKIEVGDDDESSCYEENDYYCLQPNSCSNLLGFPVQDHGTWFWQV

SEQ ID NO: 567 - protein, 120 aa, Aspergillus oryzae
MAPQDSPASDAPPGSVNINSLSVPQLRALQTRLSSELEHLTSSHAKLRAAQSKFRDCVRSINEGVVGSEKRGTDGRDDILVPLTSSLYVKGKLADREKVLVDVGTGFYVEKVSLCPLYKG

SEQ ID NO: 568 - protein, 505 aa, Arabidopsis thaliana
MSSTFNPAASSPDEEETGEVKIEDQCVENKQSTPASCSSVSEGSAGSSHKSPTIASPATVSPTHRYLGRTSGPIRRAKGGWTPEEDETLRQAVDTFKGKSWKNIAKSFPDRTEVQCLHRWQKVLNPDLIKGPWTHEEDEKIVELVEKYGPAKWSIIAQSLPGRIGKQCRERWHNHLNPDINKDAWTTEEEVALMNAHRSHGNKWAEIAKVLPGRTDNAIKNHRNSSLKKKSEFYLLTGRLPPPTTTRNGVPDSVTKRSSSAQKRVFGSVAQTSSVTTDVNNLAEDGNGQINSSVPVEEVVAASRMTSLNEYARSPQLPNPEPLPENGGAANNGYHLYYTPQIDYYRASEVDTQRMYGNECGCSPSASPVSFFTPPPCRNVHSNGSTPRSPESYLREAGRTYPNTPSIFRKRRPRVVVQDNNNAKKTDEAKEVDQKVNDGKDSSEIQNNGSNAYNLSPPYRIRSKRTAVFKSRQLEFISREEEKADDETKSSEKDMLIDGDSQLLG

SEQ ID NO: 569 - protein, 309 aa, Craterostigma plantagineum
MDSCSVYGDDHPHLKNALLKNEASEDLDSLWPHDSSNPSFHGSASPAMVNFEDVRGEDSPSPQKPIFPKIGNNAGKTRNSEELILDAFSSQKKRRLSSDQVRFLDKSFEVDNKLEPERKVQLAKELGLQPRQVAIWFQNRRARYKTKLLEKDYDALKSNYDRLKEDFDALYSENEKLKTEVNTLAEKLLGKADHGDHRPIKEEPPFDDDVNKQTKASSAKSDVLDYSDADGGNQRSPTMLELEHGDSSHVVGAISDYEDDDSLGRSLLLEAGNCLTKIEESFYDDLQPNSNCNLGFPVQNNHGTWFWQV

SEQ ID NO: 570 - protein, 336 aa, Solanum tuberosum
MENVHHHHDHDNIGNFIQRPNFPLQLLEKRDQVDHTTICSSQVHPYNSTSLHMMTTSSSDAPCVDHNQKSKNEDKKQQQPQAKKPTTTKDRHTKVDGRGRRIRMPATCAARVFQLTRELGHKSDGETIEWLLQQAEPAVIAATGTGTIPANFSSLNISLRSSRHHSSATNYLAHNNNFGHVYPDRNYFNGVGLFSSENNSFFPSGNLNMLQAKEELCDDDDNDNDNNNNNTGRIKRRSEDQDLLQNNYHMSNMLQSSPYGSIPASHQVGQIPATTLYMMTNNNNSSHHDPSNCSMWGSSSNNNNNIENSNIRFINQFWGHVAVAAAGRRRKGNGGC

SEQ ID NO: 571 - protein, 255 aa, Zea mays
  misc_feature (56)..(56): Xaa can be any naturally occurring amino acid
MEPSSQPQPAMGVAAGGSQVYPASAYPPAATVAPPAVASAGLQSVQPFPANPAHMXAQHQIVYQQAQQFHQQLQQQQQQQLQQFWVERMTEIEATADFRNHNLPLARIKKIMKADEDVRMISAEAPVVFAKACEIFILELTLRSWMHTEENKRRTLQKNDIAAAITRTDIYDFLVDIVPRDEMKDDGIGLPRPGLPPMGAPADAYPYYYMPQQQVPGPGMVYGAQQGHPVTYLWQDPQEQQEQAPEEQQSLHERD

SEQ ID NO: 572 - protein, 295 aa, Arabidopsis thaliana
MPTLYKKAGCQFQLTTMEETEKNKGSISMVEANLPPGFRFHPRDDELVCDYLMRRTVRSLYQPVVLIDVDLNKCEPWDIPQTARVGGKEWYFYSQKDRKYATGYRTNRATATGYWKATGKDRAIQRNGGLVGMRKTLVFYRGRSPKGRKTDWVMHEFRLQGKLLHHSPNSLEEEWVLCRVFHKNSNGADIDDITRSCSDATASAFMDSYINFDHHHIINQHVPCFSNNLSHNQTNQSGLISKNSSPLFNASPDQMILRTLLSQLTKKVEESQSRGDGSSESQLTDIGIPSHAWNY

SEQ ID NO: 573 - protein, 96 aa, Triticum aestivum
MASLSMSAGWTPKQSKLFEQALAVHDRDTPDRWHNIARAVGGGKSADDVRRYYELLVHDIARIEAGKVPFPAYRPPCPRTGHNASYEADRLKHLKI

SEQ ID NO: 574 - protein, 381 aa, Cleome spinosa
MLKEERTSGGETGENNWARICDTCRSAACTVYCRADSAYLCTSCDARVHAANHVASRHERVWVCESCERAPAAFLCKADAASLCAACDAEIHSANPLARRHHRVPILPISGSMSGPMANHHPSETAMTDTENDMVVGREEAEDEDEDDEEAASWLLLNPGKNSGNNNNQNNGFFFDGEADEYLDLVEYNSSMENQFSDQYSQYHQDCGVPQKSFGGDGVVPLQVEESRGQLHHEQQSFQLAITYGSPGALYGSYNGSMNHSVSMSSMDIVVVPESTASDMAVVSQLRAPKGTTDLLIGPPIQMMPQLSPMDREARVLRYREKKKTRKFEKTIRYASRKAYAETRPRIKGRFAKRTDIEAEVDQAFSTTLMQESGYGIVPSF

SEQ ID NO: 575 - protein, 351 aa, Zea mays
MELGLSLGDAAVPDAGRAAPELGLGLGVGIGSNAAGTGRGSKAAGTTGTTGWWAAPATPESAVRLSLVSSLGLQWPPPDGGIWRDEAPARGFDVNRAPSVAGSALALEDDEEEPGAAALSSSPNDSAGSFPLDLGGPRAHAEGAAARAGGERSSSRASDEDEGASARKKLRLSKEQSAFLEESFKEHSTLNPKQKAALAKQLNLRPRQVEVWFQNRRARTKLKQTEVDCEYLKRCCETLTEENRRLHKELAELRALKTAPPFFMRLPATTLSMCPSCERVASGPSPASTSAPASSTPPATAATTAISYAAAAAAPVRADHRPSSFAALFAATRSFPLASQPRPPAPASNCL

SEQ ID NO: 576 - protein, 221 aa, Zea mays
  misc_feature (132)..(132): Xaa can be any naturally occurring amino acid
MATTREVSSSAAPMFHVYQTIPMPTPSTAAAGGGGAMVSVSAPAKPGKKEGGGKDRHSKVNGRGRRVRMPIVCAARVFQLTRELGLKSDGQTIEWLLRQAEPSIVAATGSGTTPAVFVSSSAPSTSSSSSHXTTTSSRPPRCLGKRPREEGDAAGSVFWAALPAAPRATEAWGFSPLEAQAAAAAAAAAYVPMAQAQAQHHHLNLLAALSGAARRAEEETR

SEQ ID NO: 577 - protein, 514 aa, Arabidopsis thaliana
MDYSDDDMIDNESGEENNSDGGGNESYNYNAAVDTIILSEKSYVIIKEEEILKLQRDDIERVSTILFLSQVEAIVLLLHYHWCVSKLEDEWFTDEERIRKTVGILKEPVVDVNGTEVDIQCGICFESYTRKEIASVSCGHPYCKTCWTGYITTKIEDGPGCLRVKCPEPSCYAVVGQDMIDEVTEKKDKDKYYRYFLRSYVEDGKKMKWCPSPGCECAVEFGESSGYDVACLCSYRFCWNCSEDAHSPVDCETVSKWIFKNQDESENKNWILANSKPCPKCKRPIEKSHGCNHMTCSASCGHRFCWICGKSYSDHYACNNYVEDADHDKRTLLQSEIKRYTHYYVRWVENQSSRLKAMSDLEKFQSVQLKQLSDNQCKPKIDLQFIVDAWLQIIECRRVLKWTYAYGYYLDNLAKRPLFEYLQGEAETGLERLHHCAENELKQFFIKSEDPSDTFNAFRMKLTGLTKVTKTYFDNLVKALENGLADVTKSSEESADFLETQKLYDAYISEGCFF

SEQ ID NO: 578 - protein, 537 aa, Arabidopsis thaliana
MSSSDRDIIDIESGEEDLYSDGGNDIIDIESGEEDLYSDGGNVSDDYNPVDDTISRSEKSYVVVKEEDILKLQRDDIEQVSTVLSVSQVESIVLLLHYHWCVSKLEDEWFTDEERIRKTVGILKEPVVDVNGTEVDIQCGICFESYTRKEIARVSCGHPYCKTCWTGYITTKIEDGPGCLRVKCPEPSCYAVVGQDMIDEVTEKKDKDKYYRYFLRSYVEDGKKMKWCPSPGCEYAVEFGVNGSSSYDVSCLCSYKFCWNCCEDAHSPVDCETVSKWLLKNKDESENMNWILAKTKPCPKCKRPIEKNTGCNHMSCSAPCRHYFCWACLQPLSDHKACNAFKADNEDETKRKRAKDAIDRYTHFYERWAFNQSSRLKAMSDLEKWQSVELKQLSDIQSTPETQLSFTVDAWLQIIECRRVLKWTYAYGYYILSQERNKRVFARSVFAEAENGLERLHHCAEEELKQFIGKIEDPSKNFGELRAKLIDLTKATKTYFENLVKALENGLVDVAYNESQSIEEPESFTKRSKTRKIKTLI

SEQ ID NO: 579 - protein, 423 aa, Arabidopsis thaliana
KPHPMIDYERSNTTKNINTHHHNPPPSSSSSDLLPDGNGTAVTQKRKRRPAGTPDPEAEVVSLSPRTLLESDRYVCEICNQGFQRDQNLQMHRRRHKVPWKLLKRETNEEVRKRVYVCPEPTCLHHNPCHALGDLVGIKKHFRRKHSNHKQWICERCSKGYAVQSDYKAHLKTCGTRGHSCDCGRVFSRVESFIEHQDTCTVRRSQPSNHRLHEQQQHTTNATQTASTAENNENGDLSIGPILPGHPLQRRQSPPSEQQPSTLLYPFVTNGSIELQLLPSRNCADETSLSLSIGTMDQKTMSEVEKKSYEKGETSLEREEARRETKRQIEIAELEFAEAKRIRQHARAELHKAHLFREEASRRISATMMQITCHNCKQHFQAPAALVPPPPQTHCTDESTSLAVSYMSSATTEGEKASDRASS

SEQ ID NO: 580 - protein, 433 aa, Medicago truncatula
MELDPSCAEKIPYLHRDFPKDLRVKPEIPKVIPSQPCSTLSPPPSHYTTYLYQNHRNQFKEHALNRSNNQSSFPTMIPSFRDPISMIPMPSYNDAHNNGSQREFLSARNPMIFTSNNNKIEAMHGCLHTGEGIWDLSKKNIFRYGETSQSMVSPDLSPSLVYDAHRSVSIKPKLQGDTFFYGGLRNEPQENDGPVLTGQRRQKRIQNNSEIQHKDLNIIKGQWTTDEDRILIQLVDRFGLRKWSKIAKYMNGRIGKQCRERWNNHLCPDIKKESWTEEEDKILIEAHKIVGNKWAEIARRLPGRTENSVKNHWNTTKRRQKAKKKNRGNSSKGTLLLKYIMEVTSAKKVEKEMMNNSPSMMNIGNQPNYESSESDFFSEGLTTPEDGIGGYVPMMFNDDDGMASGFRSNGMEFFPEIPIKQEIDLMEKIYSNP

SEQ ID NO: 581 - protein, 985 aa, Arabidopsis thaliana
MEEKRRDSAGTLAFAGSSGDSPASEPMPAPRRRGGGLKRKANALGGSNFFSSAPSKRMLTREKAMLASFSPVHNGPLTRARQAPSIMPSAADGVKSEVLNVAVGADGEKPKEEEERNKAIREWEALEAKIEADFEAIRSRDSNVHVVPNHCGWFSWEKIHPLEERSLPSFFNGKLEGRTSEVYREIRNWIMGKFHSNPNIQIELKDLTELEVGDSEAKQEVMEFLDYWGLINFHPFPPTDTGSTASDHDDLGDKESLLNSLYRFQVDEACPPLVHKPRFTAQATPSGLFPDPMAADELLKQEGPAVEYHCNSCSADCSRKRYHCPKQADFDLCTECFNSGKFSSDMSSSDFILMEPAEAPGVGSGKWTDQETLLLLEALEIFKENWNEIAEHVATKTKAQCMLHFLQMPIEDAFLDQIDYKDPISKDTTDLAVSKDDNSVLKDAPEEAENKKRVDEDETMKEVPEPEDGNEEKVSQESSKPGDASEETNEMEAEQKTPKLETAIEERCKDEADENIALKALTEAFEDVGHSSTPEASFSFADLGNPVMGLAAFLVRLAGSDVATASARASIKSLHSNSGMLLATRHCYILEDPPDNKKDPTKSKSCSADAEGNDDNSHKDDQPEEKSKKAEEVSLNSDDREMPDTDTGKETQDSVSEEKQPGSRTENSTTKLDAVQEKRSSKPVTTDNSEKPVDIICPSQDKCSGKELQEPLKDGNKLSSENKDASQSTVSQSAADASQPEASRDVEMKDTLQSEKDPEDVVKTVGEKVQLAKEEGANDVLSTPDKSVSQQPIGSASAPENGTAGGNPNIEGKKEKDICEGTKDKYNIEKLKRAAISAISAAAVKAKNLAKQEEDQIRQLSGSLIEKQLHKLEAKLSIFNEAESLTMRVREQLERSRQRLYHERAQIIAARLGVPPSMSSKASLPTNRIAANFANVAQRPPMGMAFPRPPMPRPPGFPVPGSFVAATTMTGSSDPSPGSDNVSSV

SEQ ID NO: 582 - protein, 193 aa, Arabidopsis thaliana
MALEALNSPRLVEDPLRFNGVEQWTKCKKRSKRSRSDLHHNHRLTEEEYLAFCLMLLARDGGDLDSVTVAEKPSYKCGVCYKTFSSYQALGGHKASHRSLYGGGENDKSTPSTAVKSHVCSVCGKSFATGQALGGHKRCHYDGGVSNSEGVGSTSHVSSSSHRGFDLNIIPVQGFSPDDEVMSPMATKKPRLK

SEQ ID NO: 583 - protein, 644 aa, Nicotiana tabacum
MEAIFQEQLFPGADAFIFRHPSSILVDPREDHVVQNGTIVNRHSFEDYSHVHSNVSDPIVRDGDSSPKEEGEGEGDHSDAMYKYISQMLMEEEDLEYKPCMFHDCMALQAAEKYFSDVLHGSDNITNSPQFSAIIPQDKVSSSCPDFSNTSSDSIESLQWDLNFESPVSVKSLSGSLLTSFRSPSGLREKKNHHRQDDDQQRSNKQLATFAADESEPLEMYDNVLLLCPNNPCVLPNEVKKPIKVGRPRSGGKKHSSSKKEIVDLRGLLTQCAQAMSSYDTRTANELLMRIRQHSSSHGDGTERLAHYLANALEARLSSTGTASYTVFASSRISAAHILKAYKAFITACPFKLMSNIFANKYIKKLITGGAPRTIHIIDFGILYGFQWPCLIQSLSALRRGEPIKLRITGVELPQPGFRPAERVEDTGRRLKKYCDRFHVPFEFNAIAKKWESITLEELAIDRDEVLVVNSLYRLGNIPDETVVPTSPRDVVLDLIRRIRPDMFIHGVVNGTYNTPFFLTRFREALFHFSTLFDMFEATMPREDEDRKLFEEEVFARDAMNVIACEGTERVERPETYKQWQLRCARAGFKQLPLDQEIVNFVSNKVRREYHKDFSVDEDSQWMLQGWKGRVVYALSCWKPAEQL

SEQ ID NO: 584 - protein, 546 aa, Malus x domestica
MGPYGSTTCSGASSSASSSSSSSVTKPPADTDGCLADAGYKVRSSDLRHVAQRLERLETVMVNSPGDLSHLASDAVLYNPADLATWVDSLLTEFNHQPLISLPSDLDFSEGAVINNPAALPRQTWTDNSAVIAAVPQQNHNQLTVVTAMEEDSGIRLVHLLVTCAESVQRGDLALAGSLIENMQALLTRVNPSCGIGKVAGYFIDALSCRIFSPQTVGSASGSVHENELLYHYFYEACPYLKFAHFTANQAILEAFDGHDCVHVIDFNLMHGLQWPALIQALALRPGGPPLLRLTGIGPPSPDGRDSLREIGLRLAELARSVNVRFAFRGVAASRLEDVKPWMLQVSPKEAVAVNSIMQLHRLLGSDPNRNSPIEMMLSWIRNLNPKIVAVVEQEADHNKPGFLDRFTEALYYYSNMFDSLEACAMQPEKALAEIYIQREICNVVCCEGAARVERHEPLDKWRIRLEQAGFKPLHLGSNAFKQASMLLTLFSAEGYRVEENQGCLTLGWHNRPLIAASAWQVMPMAEATANQQPVGIINQNNNPNR

SEQ ID NO: 585 - protein, 244 aa, Glycine max
MGRGRVQLKRIENKINRQVTFSKRRSGLLKKAHEISVLCDAEVALIVFSTKGKLFEYSSDPCMERILERYERYSYAERQLVASDQPQTENWTLEHAKLKARLEVLQKNQRNFMGQDLEGLSIKELQNLEHQLDSALKHIRSRKNQIMHESISELHKKDKVLQEQNNTLAKKIKEKEKALAQHAQMEQRGDEMDLTSSALVPHPLETSNIRESSQIRGEGDNEGTPTPTRANAILPSWMLRPSNE

SEQ ID NO: 586 - protein, 199 aa, Ceratopteris pteridoides
RNGLLKKAHELSVLCDAEIALIIFSSTGKLFEHSSSRGIKKILERYKRCSGILQDVGGTVIRDVEYWKQEAERLKERLTYMEEIQRNMLGESLGSLQIKDLQNLEAKLDSGLYKIRGAKTQLMVRQVQELQKKEQILLQQNEALRTKLAELSRLQAPVSGLTTATTSQDVQESSSGSGSRQHETSLSAAETTLQLGFAQ

SEQ ID NO: 587 - protein, 392 aa, Nicotiana tabacum
QSPSKYYLFLSYMSDKLPTSINLYEEQESMDQHSNHMIIEVATPNAHLQQPQQILLPGISGGDTTSSGGEDNNNNVKLAPKKRAETWVQEETRALISLRRELDSLFNTSKSNKHLWDQISLKMREKGFDRSPTMCTDKWRNLLKEFKKAKHNQEPNGSAKMSYHKEIEEILKARNKNYKNPTLKVDTFMQFSQKGLDDTSITFGPVEENGRPTLNLERQLDHDGHPLAITAADAVTASGSPWNWRETPGNGEQSNSAEGRVISVKWGDYTKRIGIDGTADAIKQAIKSAFRLRTERAFWLEDEQNIVRALDRDMPLGSYSLHVDEGLTIKVCMYEEADHSSVHTEDKTFYTANDFRDFLSHRGWTCLREYNGYRHVDMLDELCPGAVYRGVN

SEQ ID NO: 588 - protein, 983 aa, Arabidopsis thaliana
MEEKRRDSAGTLAFAGSSGDSPASEPMPAPRRRGGGLKRKANALGGSNFFSSAPSKRMLTREKAMLASFSPVHNGPLTRARQAPSIMPSAADGVKSEVLNVAVGADGEKPKEEEERNKAIREWEALEAKIEADFEAIRSRDSNVHVVPNHCGWFSWEKIHPLEERSLPSFFNGKLEGRTSEVYREIRNWIMGKFHSNPNIQIELKDLTELEVGDSEAKQEVMEFLDYWGLINFHPFPPTDTGSTASDHDDLGDKESLLNSLYRFQVDEACPPLVHKPRFTAQATPSGLFPDPMAADELLKQEGPAVEYHCNSCSADCSRKRYHCPKQADFDLCTECFNSGKFSSDMSSSDFILMEPAEAPGVGSGKWTDQETLLLLEALEIFKENWNEIAEHVATKTKAQCMLHFLQMPIEDAFLDQIDYKDPISKDTTDLAVSKDDNSVLKDAPEEAENKKRVDEDETMKEVPEPEDGNEEKVSQESSKPGDASEETNEMEAEQKTPKLETAIEERCKDEADENIALKALTEAFEDVGHSSTPEASFSFADLGNPVMGLAAFLVRLAGSDVATASARASIKSLHSNSGMLLATRHCYILEDPPDNKKDPTKSKSADAEGNDDNSHKDDQPEEKSKKAEEVSLNSDDREMPDTDTGKETQDSVSEEKQPGSRTENSTTKLDAVQEKRSSKPVTTDNSEKPVDIICPSQDKCSGKELQEPLKDGNKLSSENKDASQSTVSQSAADASQPEASRDVEMKDTLQSEKDPEDVVKTVGEKVQLAKEEGANDVLSTPDKSVSQQPIGSASAPENGTAGGNPNIEGKKEKDICEGTKDKYNIEKLKRAAISAISAAAVKAKNLAKQEEDQIRQLSGSLIEKQLHKLEAKLSIFNEAESLTMRVREQLERSRQRLYHERAQIIAARLGVPPSMSSKASLPTNRIAANFANVAQRPPMGMAFPRPPMPRPPGFPVPGSFVAATTMTGSSDPSPGSDNVSSV

SEQ ID NO: 589 - protein, 301 aa, Oryza sativa (japonica cultivar-group)
MGMEAECDRIKGPWSPEEDEALRRLVERHGARNWTAIGRGIPGRSGKSCRLRWCNQLSPQVERRPFTAEEDAAILRAHARLGNRWAAIARLLPGRTDNAVKNHWNSSLKRKLATATDGGEIDRPCKRVSPGPGSPTGSERSELSHGGCGSGSGGGQVFRPVPRPGGFDAISAADVVRPPRRRDDNDDDGDDDPLTSLSLSLSLPGFHHDSARSQFQELPSPSRSPSPPPSPPAASPSAYPFNADLVSAMQEMIRTEVRNYMAGVGLRAGCGPGAVAESFMPQLVDGVMGAAAERVGVVTRQ

SEQ ID NO: 590 - protein, 201 aa, Trollius laxus
AGILKKAKELTVLCDAEVSLLMFSSTGKLHEFVSPCTTTKKVYDRYQQTSGINLWQSHYERMQDNLNKLKEINRKLRREIRQRNGEDLDGLTFQQLCTLEQNMDKSSECVRNRKFHVIGTQTDTYKKKVKNHEETQNDLLREMQRREAEYHYAFGDQEGDYPSAVNGNAAHIFAFRLQPSQPNLHLQDDASGYGSYGLSLA

SEQ ID NO: 591 - protein, 872 aa, Zea mays
MAPSDDSVAAPPLLPMSSGGGVAAFPSVVAPSSDMFLWGCERQIQRRLLVSKWPPTWNLLRRLSYVFDLSPSLVVPVGPTTPMSPSSSHTRDTAPEPLKPSTRQFDHVTMDSYNYNYASFFHDEAPSFYPHVAVPPSPELPIGLIASPGEPEPPFAPPMPASFQDYTGAVGVGVGVRAPFGGASVHGQAIDALGGGDGQREQSMAMAEDGEEPAPRRRQPAGGPAAAAVESSRGFRHMMRERQRREKLSQSYADLHALVAARSRGDKNSIVQAAAVYIHELRGARDQLQRRNEELKARILGHDAGQQCVKVQFEVDEPASAIDSMIGALRRLKGMDVRARGIRSSLSGRRLWTEMNVETTMAADEVERGVEEALLQEVERKQQQQLGAGSAAPASKWDFEHGSSGPEEAGEKWGRGTGTFRSCRVEIPSRGGNRSPQAPPPPRLGKPGSRATAPAGGTTYFSAVKPSVIQLRGPTKVSVFIASNDAEQACRLRLQDHRKLPRQRLCRLPRNLAGPRGPTSANPALHGRYAQSTPPWKGAILDPATTQIHSTRAMHLSLLSSEISPFRALSWPSVVRLAVVDVVPFTFLVEKDMDIGHHVNGLRKHPSNEVWQLVKLLVRKWKEIVDDWVRLHNSGGDGSGSIICDGDSPDKVQSKYHQNTHALGIPPTFFAIGTWYSSEHDFNGGNCDQARRHRVVVESREAMPLSFDNSTTEDSAAAVKPKPKVRVRKNPMKQSCFDFTKVDAVLLPIVFLLVRPNVGKSALFNRIIASLRANQLCERLPSPNGESTIDCHQISKMPNLAFTIANKTFTLTPEQYIVKLEQAGQTICISGFMAFDVPPPRGPLWILGDVFMGVYHTVFDFGENMIGFAKSA

SEQ ID NO: 592 - protein, 268 aa, Glyptostrobus lineatus
VEHRPFSAAEDAAIIEAHLRHGNKWATIARLLPGRTDNAIKNHWNSTLRRRSLQQQSQNLSRKRSGIFSEGDYEVESRGLKRLNLVQSPADSGNPSDFNLNVSLPGSASPGSSLHRQSAFKSYESLKTPEDASSPWSSASGSPSALCSSDPPTLLSLSLPGSTSSSENNSGECHEQNVCSSPVKLQVNQQPFVPVNGGYLKAEDAISMMSAAVKMAVAQALPLMFQSSAGEGTSSDFGSGALSVMREMVAKEVRSYMNGLSAFAPVLK

SEQ ID NO: 593 - protein, 264 aa, Festuca arundinacea
MSRKKKVRRRSTGPDSVAEIIKKWKEQNQKLQEENGSRKAPAKGSKKGCMAGKGGPENSNCKYRGVRQRTWGKWVAEIREPNRGNRLWLGSFPTAVEAAHAYDEAARAMYGATARVNFSERSPDANSGCTSAPPVLMSNGPTAVSYPSDEKDESESPPSLMSDAPTATLHRSDAKDEPESAGTLVHEVKTEVSNDSRSIREERKTVEVFQPEGKALHKEEKVSYDYFNVEEVLDMIIVELSADRKMEVHEEYQDGDDGFSLFSY

SEQ ID NO: 594 - protein, 182 aa, Arabidopsis thaliana
MASRVVRTSMRLRRRDGVTQNEHQGDQQVADQAPTVPQIVATPPRINVVAIEDDDDVVESTASAFAQAKNKSRSARRGSQVVDVESAGANRSTRRRSDQTSVDSVELNKPRKSKAVAPPVEEPKFSCPICLCPFTQEVSTKCGHIFCKKCIKNALSLQAKCPTCRKKITVKGLIRVFLPTTR

SEQ ID NO: 595 - protein, 254 aa, Festuca arundinacea
MSRKKKVRRRSTGPDSVSEIIKKWKEQNQKLQEENGSRKAPAKGSKKGCMAGKGGPENSNCEYRGVRQRTWGKWVAEIREPNRGNRLWLGSFPTAVEAAHAYDEAARAMYGATARVNFSERSPDANSGCTSAPPALMSNGPTAVSHPADGKDKSESPPSLTSDAKDEPESAGTVVHEVKTEASNDSTSVREERKTVEVFQPEGKALRKEEKVSYDYFNVEEVLDMIIVELSADRKMEVHEEYQDGDDGFSLFSY

SEQ ID NO: 596 - protein, 246 aa, Brassica oleracea
MLKSVNPMTFYDIGEQQFPTLGYIVSKPGNARAYEIDPPLPTVNDVIYSSDEFRMYAYKIKRCPRTRSHDWTECPYAHRGEKATRRDPRRYSYCAVACPAFRNGACHRGDTCEFAHGVFEYWLHPARYRTRACNAGNMCQRKVCFFAHAPEQLRQSEGKHRCRYAYRPVRTTVARGRNGDGVGIREDGEDFDTWQSPVKSGESELDINEERLLKCWSGMSIVDDHYDPSDLDLNLSHIDWISALVD

SEQ ID NO: 597 - protein, 254 aa, Festuca arundinacea
MSRKKKVRRRSTGPDSVSEIIKKWKEQNQKLQEENGSRKAPAKGSKKGCMAGKGGPENSNCKYRGVRQRTWGKWVAEIRKPNRGNRLWLGSFPTAVEAAHAYDEAARAMYGATARVNFSERSPDANSGCTSAPRVLMSNGPTAVSHPADGKDESESPPSLTSDAKDEPESAGTVVHEVKTEASNDSTSVREERKTVEVFQPEGEALRKEEKVSYDYFNVEEVLDMIIVELSADRKMEVHEEYQDGDDGFSLFSY

SEQ ID NO: 598 - protein, 433 aa, Medicago truncatula
MELDPGCAEKIPCLHWNFPKDLCVKPEIPKVIPSQPCSTLSPPPSHYTTYLYQNHRNQFKEHALNRSNNQSSFPTMIPSSRHPISGISMASYNDAHNNGSQREFLSTQNPMIFTPNNNKIEAMHGCLNTREGIWDLSKKNIFRYGETSQPRVSPDLSPSLVYDAHPSVSIKPKLQGDIFFYGGFGNEPQENNGPVLTSQRLQKRIQNNIEIQHKDLNIIKGQWTTDEDRILIQLVDRFGLRNWSKIAKYMNGRIGKQCRERWNNHLCLDIKKEAWTEEEDKILVEAHKIVGNKWAEISRRLSGRTENSVKNHWNATKRCLKAKKKNRGNSSKGTLLLKYIMEVTCAKKVEKEMMTNSLSMMNIGNQPNYESSESDFFSEGLTTPEDEIGGYVPMMFNDDDGMASGFGSNGMEFFPEIPKKQEIDLMEKIYRNP

SEQ ID NO: 599 - protein, 62 aa, Taraxacum officinale
KERKPSLNISIPFPPPLVAPVKVEELEERKHYRGVRQRPWGKFAAEIRDPNKKGTRVWLGTF

SEQ ID NO: 600 - protein, 206 aa, Brassica oleracea
MAAFEESSDLDAIQEHLLEDFLVADGFMGDFDFNASFVSGLWCIEPVMNQVPKQEPDSPVLDPDSFVREFLQVEAESSSEQNSSPHETDQSVSPRKEAKRLEEEEEPRHYRGVRRRPWGKFAAEIRDPAKKGSRIWLGTFESNVDAARAYDCAAFKLRGRKAVLNFPLDAGKYEAPVNLGRKRKRSDVQEELQRSQSNSSSSSSDL

SEQ ID NO: 601 - protein, 381 aa, Medicago truncatula
MGRHSCCYKQKLRKGLWSPEEDEKLLNYITKHGHGCWSSVPKLAGLQRCGKSCRLRWINYLRPDLKRGAFSEQEENSIIELHALLGNRWSQIAAQLPGRTDNEIKNLWNSSLKKKLKQKGIDPNTHQPFSENNDNDTPNIQIQKTSVGSNEVKNLFDDTPNPNSIPMDNCNYPLEINSKINNSVNCFIPCDNMVGLGGGSYLNFQQLNYGINNMTLSPPNSNSNTSLCFIPSTSGSTSTCSQMMSELNSSTMFHSMYTNHPSNSISSGEVDGIQNWEFGASKSSNGSSINNYLDHQVVEDIKWSDYINSTPFFLGNNNTFQQTTTSTHSSIYEVKQEMGGFINTNESIQSSSSTWHPHFEADIYSNKDLQRFSLAFGQTLN

SEQ ID NO: 602 - protein, 369 aa, Oryza sativa (indica cultivar-group)
MSRLAAVYRLFTTDEEIHELTGERSVVKTKDAELELVIPAVFVRCNKKSKPEFFFPLFYINKNSLLTGSLELFENYGSLKNKKHLVVYEIKKCRTTSNPTGIIYQITNFLNGTKHEIVNIAVTMDNQQLPYAGQPAAAGAGAPVPGVPGAGGPPAVPHHHLLQQQQAQLQAFWAYQRQEAERASASDFKNHQLPLARIKKIMKADEDVRMISAEAPVLFAKACELFILELTIRSWLHAEENKRRTLQRNDVAAAIARTDVFDFLVDIVPREEAKEEPGSALGFAAGGPAGAVGAAGPAAGLPYYYPPMGQPAPMMPAWHVPAWDPAWQQGAAPDVDQGAAGSFSEEGQQGFAGHGGAAAGFPPAPPSSE

SEQ ID NO: 603 - protein, 728 aa, Oryza sativa (indica cultivar-group)
MTEILSPTKTILLADCSSKKAHAFNPRKGGGCKDAKGISLPCQPCDSKVFSHPLANRNRNGLVINCVLRQLQQQQQQLVLLFHSFTVPPLFLALSRTRKAPAFTLSPLAFPHPRRSGIWWLLASRVSFAGLGRSWELGNSGGLVGFRGELRQIFEMNCGPPDQLPPATAPSCFLNLNWDQSMDAAAGGHLDPALSSMVSSPASNSTGALHGISPQPHYGGGTPLSSPPKLNLSMMGQFHHYAAPPQVGGGGGGGGGLPILENLMPMGHLDQFLADPGFAERAARLSGFDARGGGGGGGYGGAGPAQFGLPDAGAAGASKEMELGNTRDESSVSDPAPGGAEIPPKGASDGNARKRKASGKGKGKDSPMSTSAAKEDSSGKRCKSTEESNAAAEENSGKGKAAQSNSENGGGKKQGKDSSSKPPEPPKDYIHVRARRGEATDSHSLAERVRREKISQRMKLLQDLVPGCNKVVGKAVMLDEIINYVQSLQRQVEFLSMKLATVNPQLDFNNLPNLLAKDMHQSCSPLQSSHFPLETSGAPLPYINQPQQGNPLGCGLTNGMDNQGSMHPLDPAFCRPMGSHHPFLNGVSDAASQVGAFWQDDLQSVVQMDMGQSQEIATSSNSYNVLEGSENKLNFRICLSQKRVHMKIQDYLTASPADFFSTISMGIDNVMRYKKETALQQMRRSHGKKRGAKGETGTVHIHSHKQSIIKPCLRLLADNFYSRRDIQS

SEQ ID NO: 604 - protein, 220 aa, Ceratopteris richardii
MGRGKIEMKRIENRTTRQVTFCKRRAGLVKKARELSVLCDADVALIVFSSSGRLFEYAGSRSMREIIQAYVDAHEDSSSLLQLRSEEACVSQDLRAELTELRKEVESLRQEKRRKDGDIHDLKLLSADELDSLEGEVETSLCSIRKRQKQLYREKMNETFRKEEELRKENEKLRKQVEELQCARWEICCAQGFEASATSMCTSHGMTSERSDSFLDLRLN

SEQ ID NO: 605 - protein, 215 aa, Picea abies
MGRGKIEIKMIENPTNRQVTFSKRRGGLTKKAQELSVLCNAEVALIVFSNTGKLHQWSSSSMKKVLERYQKSEQGLGLMDYQHQQLLFEMRRITKENESLQARLRHMRGEDINSLKLPELFNLEEQLELAGTQVRRRKDHVLDNEKTKRQNKERRLQQENMILQEMVDQHHGHMEEDNGEINFVLCQPLKRLSTAFPAPLLRLQPNQPNLQDIGY

SEQ ID NO: 606 - protein, 546 aa, Malus x domestica
MGPYGSTTCSGVSSSASSSSSSSVTKSPAEIDGYLADAGYKVRSSDLRHVAQRLERLETVMVNSPSDLSQLASDAVLYNPSDIATWVDSLLSEFNHQPLMSLPSDLDFPDSAVINNPAALSGETWTDNSSFVSAVPQQNHQLTVVTAMEEDSGIRLVHLLVTCAESVQRGELALAGSLIENMQALMTRVNTSCGIGKVAGYFIDALSRRIFSPQSVGSAAGSTHENELLYHYFYEACPYLKFAHFTANQAILEAFHGHDCVHVIDFNLMHGLQWPALIQALALRPGGPPLLRLTGIGPPSPDGRDSLREIGLRLAELARSVNVRFAFRGVAASRLEDVKPWMLQVSPKEAVAVNSIMQLHRLLGSDPNRNSPIEMMLSWIRNLNPKIVTVVEQEADHNKPGFLDRFTEALYYYSTMFDSLEACPMQPEKTLAEMYIQREICNVVCCEGAARVERHEPLSKWRTRLGQAGFSPLHLGSNAFKQASMLLTLFSAEGYRVEENQGCLTLGWHSRPLIAASAWQVMHVAEATINHQTVGILNQNNNPNRI

SEQ ID NO: 607 - protein, 228 aa, Arabidopsis thaliana
CQLCTKKQATCAPFLIQSPFSGFSPEYSIGSSPDSFSSSSSNNYSLPFNENDSEEMFLYGLIEQSTQQTYIDSDSQDLPIKSVSSRKSEKSYRGVRRRPWGKFAAEIRDSTRNGIRVWLGTFESAEEAALAYDQAAFSMRGSSAILNFSAERVQESLSEIKYTYEDGCSPVVALKRKHSMRRRMTNKKTKDSDFDHRSVKLDNVVVFEDLGEQYLEELLGSSENSGTW

SEQ ID NO: 608 - protein, 268 aa, Gossypium raimondii
GAWTKEEDQRLINYIRVHGEGCWRSLPKAAGLLRCGKSCRLRWINYLRPDLKRGNFTEEEDELIIKLHSLLGNKWSLIAGRLPGRTDNEIKNYWNTHIKRKLISRGIDPQTHRPLNQTANTNTVTAPTELDFRNMPTSVSKSSSIKNPSLDFNYNEFQFKSNTDSLEEPNCTASSGMTTDEEQQEQLHKQQQYDPSNGQDLNLELSIGIVSADSSRVSSANSAESKPKVDNNNFQFLEQAMVAKAVCLCWQLGFGTSEICRNCQNSNS

SEQ ID NO: 609 - protein, 219 aa, Picea abies
MGRGKIEIKMIENPTNRQVTFSKRRGGLTKKAQELSVLCNAEVALIVFSNTGKLHQWSSSSMKKVLERYQKSEQGLGLMDYQHQQLLFEMRRITKENESLQARLRILYRHMRGEDINSLKLPELFNLEKQPELAGTQVRRRKDHVLDNEKIKGKNKERRLQQENMILQEMVDQHHGHMEEDNGEINFVLCQPLKRLSAAFPAPLLRLQPNQPNLQDIGY

SEQ ID NO: 610 - protein, 265 aa, Gossypium herbaceum
TKEEDQRLINYIRVHGEGCWRSLPKAAGLLRCGKSCRLRWINYLRPDLKRGNFTEEEDELIIKLHSLLGNKWSLIAGRLPGRTDNEIKNYWNTHIKRKLISRGIDPQTHRPLNQTANTNTVTAPTELDFRNSPTSVSKSSSIKNPSLDFNYNEFQFKSNTDSLEEPNCTASSGMTTDEEQQEQLHKKQQYGPSNGQDINLELSIGIVSADSSRVSSANSAESKPKVDNNNFQFLEQAMVAKAVCLCWQLGFGTSEICRNCQNSNS

SEQ ID NO: 611 - protein, 142 aa, Zea mays
MLLTSTSSSTHCHLNNEELGGGGCTKAEGPGAAGGAGAVVAKSPVLSSSRHWPPSTESRIVRVSRVFGGKDRHSKVRTVKGLRDRRVRLSVPTAIQLYDLQDRLGLSQPSKVVDWLLDAAQDEIDKLPPLQFPPQGQDLVAH

SEQ ID NO: 612 - protein, 263 aa, Gossypioides kirkii
AWTKEEDQRLIDYIRVHGEGCWRSLPKAAGLLRCGKSCRLRWINYLRPDLKRGNFTEEEDELIIKLHSLLGNKWSLIAGRLPGRTDNEIKNYWNTHIKRKLISRGIDPQTHRPLNQTANTNTVTAPTELDFRNTPTSVSKSSSIKNPNFNYNEFQFKSNTDSLEEPNCTASSGMTTDEEQQEQLHKKQQHDPCNGQDLNLELSIGIVSADSSRVSSANSAESKPKLDNNNFQFLEQAMVAKAVCLCWQLGFRTSEICRNCQNS

SEQ ID NO: 613 - protein, 303 aa, Elaeis guineensis
MGSRRRDAEAELNLPPGFRFHPTDEELVVHYLCKKVACQRLPVPIIAEVDLYKYDPWDLPEKALFGLKEWYFFTPRDRKYPNGSRPNRAAGRGYWKATGADKPVTPKGSSRPLGIKKALVFYSGKAPRGVKTDWIMHEYRLADTNRAANKKGSLRLDDWVLCRLYNKKNTWEKMQQQKEAASFGETMDSVDDTGSDSFRTPESDIDNDVMFPDFDDMAQVGAHPPQAFNGMQGVRVNNITGYQPAIEQRPKEENDWFTDLNLDDFHSTCMAFGSTPALDMSDHDYYYSNLPQLRSNQSDLLPF

SEQ ID NO: 614 - protein, 268 aa, Taxodium distichum
VEHRPFSAAEDAAIIEAHLRHGNKWATIARLLPGRTDNAIKNHWNSTLRRRSLQQQSQNLSRKRSGIFSEGDYEVESRGLKRLNLVQSPADSGNPSDFNLNVSLPGSVSPGSSLHRQSAFKSYESLKTPEDASSPWSSASGSPSALCSSDPPTLLSLSLPGSTSSSENNGGECQEQNVCSSPVKLQVNQQPSVTVNGGYLKAEDAISMMSAAVKLAVAQALPLMFQSSAGEGTSSDFGSGALSVMREMVAKEVRSYMNGLSAFAPVFK

SEQ ID NO: 615 - protein, 335 aa, Elaeis guineensis
MGSRRRDAEAELNLPPGFRFHPTDEELVVHYLCKKVACQRLPVPIIAEVDLYKYDPWDLPEKALFGLKEWYFFTPRDRKYPNGSRPNRAAGRGYWKATGADKPVTPKGSSRPLGIKKALVFYSGKAPRGVKTDWIMHEYRLADTNRAANKKGSLRVCHRQSEIHKFFGFLGFFMNIDSDEKIHEFMQLDDWVLCRLYNKKNTWEKMQQQKEAASFGETMDSVDDTGSDSFRTPESDIDNDVMFPDFDDMAQVGAHPPQAFNGMQGVRVNNITGYQPAIEQRPKEENDWFTDLNLDDFHSTCMAFGSTPALDMSDHDYYYSNLPQLRSNQSDLLPF

SEQ ID NO: 616 - protein, 634 aa, Arabidopsis thaliana
MMSSSSPTQLASLRDMGIYEPFQQIVGWGNVFKSDINDHSPNTATSSIIQVDPRIDDHNNNIKINYDSSHNQIEAEQPSSNDNQDDDGRIHDKMKRRLAQNREAARKSRLRKKAYVQQLEESRLKLSQLEQELEKVKQQGHLGPSGSINTGIASFEMEYSHWLQEQSRRVSELRTALQSHISDIELKMLVESCLNHYANLFQMKSDAAKADVFYLISGMWRTSTERFFQWIGGFRPSELLNVVMPYLQPLTDQQILEVRNLQQSSQQAEDALSQGIDKLQQSLAESIVIDAVIESTHYPTHMAAAIENLQALEGFVNQADHLRQQTLQQMAKILTTRQSARGLLALGEYLHRLRALSSLWAALMSNLRAICRPYSVFSSIVCCSRHQSRSLFRVSIKNVAFRNQSSNSSWFRSKNSNLWFRLNQRKTLVRASNWSQEKSPYDTLELDRNAEEEQIKVAYRRLAKFYHPDVYDGKGTLEEGETAEARFIKIQAAYELLMDSEKKVQYDMDNRVNPMKASQAWMEWLMKKRKAFDQRGDMAVAAWAEQQQLDINLRARRLSRSKVDPEEERKILEKEKKASRELFNSTLKRHTLVLKKRDLMRKKAEEDKKKLITQLLAAEGLELDTEAEEEEAAK

SEQ ID NO: 617 - protein, 268 aa, Sequoia sempervirens
VEHRPFSPAEDAAIIEAHLRHGNKWATIARLLPGRTDNAIKNHWNSTLRRRSLQQQSHNLGRKRSGVFSEEDYEVESRGLKRPNLIQSPSGSDNSSDFNLNVSFPGSTSAGSSLHRQSAFKSYESQKTPEDASSPWSPSSGSPSVLCSSDPPTLLSLSLPGSTSSSENNGGECQEQNCSPSPVILQANQQPPVPVSGDYLKAEDAMSMMSAAVKMAVTQALPLMFQSSTGVGTSSDFGGGALSVMREMIAKEVRSYMNGLNAFAPVLK

SEQ ID NO: 618 - protein, 285 aa, Chamaecyparis pisifera
VEHRPFSAAEDSTIIEAHLRHGNKWATIARLLPGRTDNAIKNHWNSTLRRRSLQQQSQNLSRKRSGIFSEGDYEVESGGLKRLNLTQSPAGSENPCDFNLNLAQSPAGCENLSDFNLNVSLPGSNSAGSSLHRQSAFKSYESQKTPEDSSSPWSSSSGSPSALCSSDPPTLLSLSLPGSTSSSENNGGECQEQNCSSSPVRLQAIQQPSVPVNGGYLKAEDAVSMMSAAVKMAVAQALPLMFQSSAGEGASSDFGSGALSIMREMVAKEVRSYMNGLSAFAPVLK

SEQ ID NO: 619 - protein, 223 aa, Arabidopsis lyrata
MRIRRREEKENQEYKKGLWTVEEDNILMDYVLNHGTGQWNRIVRKTGLKRCGKSCRLRWMNYLSPNVNKGNFTEQEEDLIIRLHKLLGNRWSLIAKRVPGRTDNQVKNYWNTHLSKKLVGDYSSAVKTTGEDDDSLPSLFITAATTSCHHQQENVYENIAKRFDGVVSASYEDKPKQELAQNDVLMATTNDPSHYYGNNALWVHDDDFELSSLFTRNDEFCFW

SEQ ID NO: 620 - protein, 369 aa, Zea mays
MVVASSGGAGGVEGGSGCGVSASVPPVVSSSGGAGEVEGGDGGSAAVSGSRRRVKGSWTPEEDELLRRAITRHGPRNWTVISSEIPGRSGKSCRLRWCNQLSPSVERRAFTPEEDAIIVAAHAQHGNRWATIARMLHGRTDNSVKNHWNSTLLRQRRAAAAHASAAGCALQLRPATTASVPLRHLLDRPKEAAASVSFRRLDPKAEEEEDEDMDEGGSSSEDSAHRHRSLSPAPVEPLTLNLFSDGAHGLPTPAPAPAPQGTAARTEGAAMRRKAKLEQDPWLSGGVHGAPAPAPQSAAARTEGAVVTRMKTKLEHDPWLVTLVRQMISVEVERQMHGVGPQARSSAGGGGGADGDGVNGQDTSMDVDP

SEQ ID NO: 621 - protein, 383 aa, Oryza sativa (indica cultivar-group)
MTRDGAPPASGGGGAAEGPRRCSQCGHHGHNARTCTARGPVKLFGVRIGDKPPTAAAGGGGGMRKSASMGSLAQLAEGGGGGGGREEGYGSDGNDDKRRKRGEAWSEEEHKKFLLGLSKLGKGDWRGISRNYVGSRTPTQVASHAQKYFIRQTNVHRRKRRSSLFDMVIDDSDDQPLSRTSSQEVEVEENLEDGHPVTAPVIPPAPVPMLSSSLVPPPVPAMAPVAPGPVLTSASATLPVSAVAPQTDEKEQVASGSNTTETGAAIPEVMPPYGYPMMLPPYYPPAFVPMPYYGYVPVFYAPPGAVQAQHEVVKPVAVHSKPPVHIDELYSMSELSLKGEAGVKNGTPNSPLPPRPIGRPDRQSAFHGKGPSDGSSNGLIPAK

SEQ ID NO: 622 - protein, 335 aa, Oryza sativa (japonica cultivar-group)
MIQAMASHAGGSGGGGGGSGRDAGSAQRGPMQGLARQGSLYGLTLNEVQSQLGEPLLSMNLDELLKSVFPDGADLDGGGGGGGIAGQSQPALGLQRQGSITMPPELSKKTVDEVWKGIQDVPKRGAEEGGRWRRERQPTLGEMTLEDFLVKAGVVTDPNDLPGNMDVVGGAAAAAAGTSDLNAGAQWLQQYHQQALEPQHPSIGAPYMATHLAPQPLAVATGAVLDPIYSDGQITSPMLGALSDPQTPGRKRCATGEIADKLVERRQKRMIKNRESAARSRARKQAYTNELENKVLRLEEENERLKKQKELDEILNSAPPPEPKYQLRRTSSAAF

SEQ ID NO: 623 - protein, 582 aa, Triticum aestivum
LQIRHAADDDFYSGGEAGLAASDDGDGDYDFADHDSDDSPELLSHRQQQNYCILSEAGIKQRQEDDINRVSTVLSISKSEACVLLRSYNWSVSKVHDEWFVDEERVRKVVGFPEKRIEMPNDRELACGICFENCPHASMSAAACGHPFCSVCWRGYISTAINDGPGCLMLRCPDPSCAAAVGQDMINSLANEEDKEKYGRYLRRSYIEDNRKTKWCPAPGCEYAVEFVVGSGSYDVNCNCSYGFCWNCTEEAHRPVDCATVSKWILKNSAESENMNWILANSKPCPKCKRPIEKNQGCMHITCTPPCKFEFCWLCLGSWSEHGERTGGFYACNRYEAARQEGAYDESERRREMAKNSLERYTHYYERWAANQSSRQKALGDLQSLQNDKLEKLSDIQSQPESQLKFIIEAWLQIVECRRVLKWTYAYGYYLPEHEHAKRQFFEYLQGEAESGLERLHQCAEKELQIYLEAESPSKDFNDFRTKLAGLTSVTRNYFENLVRALETGLNDVGPSTSQSTGIKNTTSKSLGGKSKTGKNRASAAGSKSGSSSRGVDDSNIWTCDQCTYVNPRSAKACQACDHQHR

SEQ ID NO: 624 - protein, 256 aa, Zea mays
MEASRQYMIRFDGHFEEGPSSAAAEPPQPFASRAFSPEQEQSVMVAALLHVVSGYATPAPDLFFPAGKEACTACGVDGCLGCEFFGAEAGRAVAASDAPRAATAGGPQRRRRNKKSQYRGVRQRPWGKWAAEIRDPRRAVRVWLGTFDTAEDAARAYDRAAVKFRGPRAKLNFSFPEQHLRDDSGNAAAKSDACSPSPSPRSAEEEETGDLLWDGLVDLMKLDESDLCLLLPVDNTLDKFHAPGQRRSGSGVPLCY

SEQ ID NO: 625 - protein, 625 aa, Oryza sativa (japonica cultivar-group)
MKREYQEAGGSSGGGSSADMGSCKDKVMAGAAGEEEDVDELLAALGYKVRSSDMADVAQKLEQLEMAMGMGGVSAPGAADDGFVSHLATDTVHYNPSDLSSWVESMLSELNAPLPPIPPAPPAARHASTSSTVTGGGGSGFFELPAAADSSSSTYALRPISLPVVATADPSAADSARDTKRMRTGGGSTSSSSSSSSSLGGGASRGSVVEAAPPATQGAAAANAPAVPVVVVDTQEAGIRLVHALLACAEAVQQENFAAAEALVKQIPTLAASQGGAMRKVAAYFGEALARRVYRFRPADSTLLDAAFADLLHAHFYESCPYLKFAHFTANQAILEAFAGCHRVHVVDFGIKQGMQWPALLQALALRPGGPPSFRLTGVGPPQPDETDALQQVGWKLAQFAHTIRVDFQYRGLVAATLADLEPFMLQPEGEADANEEPEVIAVNSVFELHRLLAQPGALEKVLGTVHAVRPRIVTVVEQEANHNSGSFLDRFTESLHYYSTMFDSLEGGSSGQAELSPPAAGGGGGTDQVMSEVYLGRQICNVVACEGAERTERHETLGQWRNRLGRAGFEPVHLGSNAYKQASTLLALFAGGDGYRVEEKEGCLTLGWHTRPLIATSAWRVAAA

SEQ ID NO: 626 - protein, 279 aa, Oryza sativa
MARQVLSSSLLPARPGHHPVPCKSSHSTQLSDAMVLESTREERRERLQGAMMERAEDLRLSLSLSSPLIAPQKRFLEMPLLPAAKRSEVVAAEEERAGLRGGGGSDEEDGGCGIDGSRKKLRLSKDQSAVLEDSFREHPTLNPRQKATLAQQLGLRPRQVEVWFQNRRARTKLKQTEVDCEFLKRCCETLTEENRRLQKEVQELRALKLVSPHLYMNMSPPTTLTMCPSCERVSNTNNNSTATAAKPLEFGGHATHAAAHHNLGSKSWGFFPAVLHAMF

SEQ ID NO: 627 - protein, 412 aa, Lupinus nanus
MYPSTYTSSGPYSCYSSASNSYPFFPFLNPENASSSNNNNNHNLLHDPLVHVPYNLPSHHHIHNTPIIQETLTNLAVSDAATMPKQDPIMSGGGGGVHHHYGLSSLLTKKPAKKDRHSKIYTSQGLRDRRVRLSIEIARKFFDLQDMLGFDKASNTLEWLFNKSKRAIKDLARSKKNNGSEGDANSLSSSSDREECNEVVSGINNEQQGITIADHDSNGVKDMKKLKRAQKEPACVRAKMKESREKARARARERTSNKMCNNNNGRVVQVQDLKKKFIATTENNTHTLQQLRSPLQLEDCARSPNNKLLHPHFSSEVPRDDNFNVIEESIVIRRKLKPSMMSSSSHHHHHQNTMIPKEASFNNNNNNDYNSFTNLSPNWDNGGNGINSRSNFCTIASMNLSTGLQIFGKSWE

SEQ ID NO: 628 - protein, 329 aa, Zea mays
  misc_feature (67)..(67): Xaa can be any naturally occurring amino acid
MDIMALNARDEEQYGNNHLGLGLSLSLGLGVATAAPVEVEPPPPPAAAAAAAAASYQRRAHHLPPRXQWWKWNGPGLFFGTTMDPSLERNQQQQQPAAARHGHEMPFLRGVDVNRAPAGETRRGSCSEDDEEPGGASSSPNSTLSSSLSGKRAAPARSGGEVADHTPRAGGGSDDEDSGGGSRKKLRLSKDQAAVLEESFKEHNTLNPKQKAALAKQLNLKPRQVEVWFQNRRARTKLKQTEVDCEFLKRCCETLTEENRRLQREVAELRVLKLVAPHHYARMPPPTTLTMCPSCERLASASASADQAGRAGPCWGPLPVFVDGPARRP

SEQ ID NO: 629 - protein, 273 aa, Arabidopsis thaliana
MALEAMNTPTSSFTRIETKEDLMNDAVFIEPWLKRKRSKRQRSHSPSSSSSSPPRSRPKSQNQDLTEEEYLALCLLMLAKDQPSQTRFHQQSQSLTPPPESKNLPYKCNVCEKAFPSYQALGGHKASHRIKPPTVISTTADDSTAPTISIVAGEKHPIAASGKIHECSICHKVFPTGQALGGHKRCHYEGNLGGGGGGGSKSISHSGSVSSTVSEERSHRGFIDLNLPALPELSLHHNPIVDEEILSPLTGKKPLLLTDHDQVIKKEDLSLKI

SEQ ID NO: 630 - protein, 339 aa, Zea mays
MESGRLIFNAPGSGAGQMLFLDCGAGGGPGGGLLHRGGRPMLGLEEGRGVKRPFYTSPDELLEEEYYDEQLPEKKRRLTPEQVHLLERSFEEENKLEPERKTELARKLGLQPRQVAVWFQNRRARWKTKQLERDFDRLKASFDALRADHDALLQDNHRLRSQVVSLTEKLREKEATEGDANGAAAALPAVGVVRASVADDVEEPEPEPEPEAEAAAFEERQVKSEDRLSTGSGGSAVVDAADALLYNGRIGGAAVDSSVESYFPGAEVQDQYHGCGTMGPVTHGAGGIQSDDDDGAGSDEGCSYYADEEAAAAFLSEHTHHADGDDEDAGQVSWWWMWN

SEQ ID NO: 631 - protein, 303 aa, Elaeis guineensis
MGSRRRDAEAELNLPPGFRFHPTDEELVVHYLCKKVACQRLPVPIIAEVDLYKYDPWDLPEKALFGLKEWYFFTPRDRKYPNGSRPNRAAGRGYWKATGADKPVTPKGSSRPLGIKKALVFYSGKAPRGVKTDWIMHEYRLADTNRAANKKGSLRLDDWVLYRLYNKKNTWEKMQQQKEAASFGETMDSVDDTGSDSFRTPESDIDNDVMFPDFDDMAQVGAHPPQAFNGMQGVRVNNITGYQPAIEQRPKEENDWFTDLNLDDFHSTCMAFGSTPALDMSDHDYYYSNLPQLRSNQSDLLPF

SEQ ID NO: 632 - protein, 721 aa, Lactuca sativa
MAQGKYSRVDGKKSSCSTATIVVVFGVCLIGVWMFMSTSVAPGQNQDLPAQHSKTESKAKVSTNPSPLFEDNSGDLPEDEKTSNEEEPSKIEAENTNDEEPTSRNTGDDSSSSQSDKSKSEDDLNSDTNETLKSNSEVDKQEKKPENDKKTESFPAADQSEILNESRTENGAFSTQAAESASEKESRQPDVLKNEDGYEWKTCNVTTGPDFIPCLDNIGALRKIRTTLHYEHRERHCPVESPTCLVPLPQGYKTPIKWPRSRDQIWYNNVPRTKLAEVKGHQNWVKVTGEYLSFPGGGTQFKNGALHYIDHIKKSLPDIKWGKRTRVILDVGCGVASFGGYLFERDVITMSFAPKDEHEAQVQFALERGIPAISAVMGTQRLPFPSKIFDAIHCARCRVPWHIEGGKLLLELNRLLRPGGYFIWSATPVYQNNTEDSEIWKAMSKLTKAMCWELVVIYSDKLNQVGAAIYKKPTSNECYDNRQQNDPPICETNDDPDAIWNVELEACMHKAPVDESIRGTKWPKTWPQRLESPPYWLKATESGVYGKPAPEDFTADYEHWKRVVSKSYLNGLGIDWSSIRNIMDMRSIYGGFAAALKDLNVWVMNVVPLDSPDTLPIIYERGLFGIYHNWCESFSTYPRSYDLLHADHLFSDLKKRCKLASVIAEVDRILRPEGKLIVRDNVETIAEVENMAKSLHWNVRLSYNKDNEGLLCVEKNIMETN

SEQ ID NO: 633 - protein, 263 aa, Arabidopsis thaliana
METLHPFSHLPISDHRFVVQEMVSFHSSSSGSWTKEENKMFERALAIYAEDSPDRWFKVASMIPGKTVFDVMKQYSKLEEDVFDIEAGRVPIPGYPAASSPLGFDTDMCRKRPSGARGSDQDRKKGVPWTEEEHRRFLLGLLKYGKGDWRNISRNFVVSKTPTQVASHAQKYYQRQLSGAKDKRRPSIHDITTGNLLNANLNRSFSDHRDILPDLGFIDKDDTEEGVIFMGQNLSSENLFSPSPTSFEAAINFAGENVFSAGA

SEQ ID NO: 634 - protein, 285 aa, Chamaecyparis obtusa
VEHRPFSAAEDSTIIEAHLRHGNKWATIARLLPGRTDNAIKNHWNSTLRRRSLQQQSQNLSRKRSGIFSEGDYEVESGGLKRLNLAQSPAGSENPCDFNLNLAQSPAGCENLSDFNLNVSLPGSNSAGSSFHRQSAFKSYESQKTPEDASSPWSSSSGSPSALCSSDPPTLLSLSLPGSTSSSENNGGECQEQNCSSSPVRLQAIQQPSVPVNGGYLKAEDAVSMMSAAVKMAVAQALPLMFQSSAGEGTSSDFGSGALSIMREMVAKEVRSYMNGLSAFAPVLK

SEQ ID NO: 635 - protein, 267 aa, Chamaecyparis pisifera
VEHRPFSAAEDAAIIEAHLRHGNKWATIARLLPGRTDNAIKNHWNSTLRRRSLQQQSQNLSRKRSGIFSEGDYEVETRGLKRLNLVQSPADSGNPSDFNLNVSLPGSASPGSSLHRQSAFKSYESLKTPEDASSPWSSASGSPSALCSSDPPTLLSLSLPGSTSSSENNGGECQEQNVCSSPVKLQVNQQPSVPVSGGYLKAEDAISMMSAAVKMAVAQALPLMFQSSAGEGSSSDFGSGALSVMREMVAKEVRSYMNGLSAFAPVL

SEQ ID NO: 636 - protein, 486 aa, Oryza sativa (japonica cultivar-group)
MGGGGKCKRGKRGKIAAKRRRGQCCSSSSSSGGARRRARERESEESLGEMGECRGGGGGGDGLIKLFGKTIPVQPDAKDVQQHSGSSSSSTESDVQETAAVAVADPSPRSEVVDGESPPQPGGEAASHQQQQKEMKLKKPDKILPCPRCSSMDTKFCYFNNYNVNQPRHFCKHCQRYWTAGGAMRNVPVGAGRRKNKNATAAAHFLHRVRACAAAAAMPAAPHDATNATVLSFGGGGGGHDAPPVTLDLADKMTRLGKEGLVAHARNADAAAACSEVSSNRDDEQIGNTVAKPANGLQQHPPPPHHHHHSAMNGGGIWPYYTSGIAIPIYPAAPAYWGCMIPPPGAWSLPWPATVQSQAISSSSPPTSATPSVSSFTLGKHPREGGDHEARDHHGNGKVWVPKTIRIDNADEVARSSIRSLFAFRGGDKADDNNDDDGTGVHKLATTVFEPKRDSKTAKHPAITSLPLLHTNPVALTRSATFQEGS

SEQ ID NO: 637 - protein, 230 aa, Brassica napus
  misc_feature (152)..(152): Xaa can be any naturally occurring amino acid
  misc_feature (207)..(207): Xaa can be any naturally occurring amino acid
MDQQEHGQSGAMNYGTNPYQTNPMTTTAAGSVGPAAPQGQLAFHQIHQQQQQQQLTQQLQVFWENQFKEIEKTTDFKNHSLPLARIKKIMKADEDVRMISAEAPVVFARACEMFILELTLRSWNHTEENKRRTLQKNDIAAAVTRTDIFDFXLVDIVPREDLRDEVLGRGTAPEAAAAGYPYGYLPPGTGPIGNPGMVMGNPGGAYXPNPYMGQPMWQQQQGPDQTDPEN

SEQ ID NO: 638 - protein, 278 aa, Musa acuminata
MRCPTAPPSSNKLSAGLQHQQQQQPPPSAHDFTKTIVLASTPFGMVPDGWTGVADGAQIQYPVLGAANVGQENASANSFENSTEKRKAPKSKQESRSSGAEEEGTARGGATSKNKKKASGSDAPKETDYIHVRARRGQATDSHSLAERVRRERISERMKYLQELVPGCSKIMGKASTLDEIINYVQSLQRQVEFLSMKLAAAEPRMHLSSSNFFDREEVHGCSTWDAGLHGFHDGEIHRVSHLCPGNQCKVNNNTSIAVCNQAETAPFALWEVSYPTI

SEQ ID NO: 639 - protein, 271 aa, Triticum aestivum
  misc_feature (107)..(107): Xaa can be any naturally occurring amino acid
  misc_feature (192)..(192): Xaa can be any naturally occurring amino acid
MAPKNALPVAVAAAVNGGMDPRFRGVRKRPWGRYAADIRDPVRKGRVWLGTFDTVEAAGRAYDAVVLHYRGPKAKTNFPVGTVAAYTHIPIPTTKALAVSPSSSTVXSSSRDTPAAAPAAPAVAAPAAPPALDLSLAMPAMVAAQSFLFLDPRVAVTVAVAAPEPEPAPCRSACISGMNKVASHEGEQTDPXSSSSVLDASPAVGLGFDLNLPAAAGDGIGDGPIFVRPMTTRPGSKASSPRGRIYGLEDWGGLLKGLSVRLTARDGPPNG

SEQ ID NO: 640 - protein, 295 aa, Glycine max
  misc_feature (113)..(113): Xaa can be any naturally occurring amino acid
MEGHHLHHHHRQQQQQQHHHQQQHQQQQHHHHPHHNITTSNVDATDRFPQWSIQETKEFLMIRAELDQTFMDTKRNKQLWEVISTRMKEKGFHKSAEQCKCKWKNLVTRYKIXKGCETMEPEATRQQFPFYNELQAIFAARMQRMLWAEAEGGSNKKKVHLSSEDEEEGNEETSEGDHKGNITSKKKKKGKMVIGGGGSGNNNLESLKEIMDEFMRQQMQMEAQWMEAFEARENERRLKEMEWRQTMEALENERLMMDQRWREREEQRRIREEVRADKRDALITALLNKLRREEM

SEQ ID NO: 641 - protein, 344 aa, Magnaporthe grisea 70-15
MDVAMKSWELDNNVKLVDPSRDALYNYDAESQKAINQQRPWAKDPNYFKSVRISAIALIKMVMHARSGGSLEVMGMMQGYVDGTALVVTDAFRLPVEGTETRVNAHDEANEYLVEYLRLSREQGRLENVVGWYHSHPGYGCWLSGIDVSTQFLQQQFMDPFVAVVIDPDRTISAGKVEIGAFRTYPENYKAEEASTSDGYQPVPLAKAEDFGAHASRYYALETEHFKSTLDAHLLELLWNKYWVQTLSQSPLITNRDYGNKQMLDLGSRIRDVVGVMQRNGRSGQSGYGMALGGASGTSKAVESAIETMARDSMHVAASQRAALMAGELKAKVFTGQAEPSAAS

SEQ ID NO: 642 - protein, 179 aa, Thlaspi caerulescens
  misc_feature (172)..(173): Xaa can be any naturally occurring amino acid
VFPNFGWPCGDHSFYEKDDVTNPFLDFPLPGLTVAHQNVSSEKNRILELENPVVMRKLNHNASERDRRKKINAMFSSLRSCLPASDQSKKLSVSATVSQALKYIPELQEKVKKLIKKKDELSFQISGQRDLVYTNQNGKPEKKGVTGYASTVSATRLGETEVMVQISSLMTXXVFILRM

SEQ ID NO: 643 - protein, 240 aa, Arabidopsis thaliana
MDARKRGRPEAAASHNSNGGFKRSKQEMESISTGLGSKSKPCTKFFSTSGCPFGDNCHFLHYVPGGYNAAAQMKNLRPPVSQVSRNMQGSGGPGGRFSGRGDPGSGPVSIFGASTSKISVDASLAGAIIGKGGIHSKQICRETGAKLSIKDHERDPNLKIIELEGTFEQINVASGMVRELIGRLGSVKKPQGIGGPEGKPHPGSNYKTKICDRYSKGNCTYGDRCHFAHGESELRRSGIA

SEQ ID NO: 644 - protein, 243 aa, Arachis hypogaea
MGRGRVELKRIENKINRQVTFAKRRNGLLKKAYELSVLCDAEVALIIFSNRGKLYEFCSSSSMLKTLERCQKCNYGAPETNVSTREALELSSQQEYLKPKARYEALQRSQRNLMGEDLGPLSSKELESLERQLDSSLKLIRSTRTQFMLDQLSELQRKEHLLSEANRALRQRQLEGYQINPMQLNPGGVDDMGYARHPPQPQPDPLFQQLDCEPTLQIGYQPDPVSVVTAGPSMGNYMGGWLP

SEQ ID NO: 645 - protein, 197 aa, Brassica napus
  misc_feature (90)..(90): Xaa can be any naturally occurring amino acid
  misc_feature (106)..(106): Xaa can be any naturally occurring amino acid
MELENQEDLATLGDSGGDFDCNICLDQVRDPVVTLCGHLFCWPCIYKWTYSTNNTRQRVDQYDKKKSSKCPVCKSEVSDATLVPIYGRGXQKVPQSGSNVPNRTIXVPVYDLRRAGQLVGEGGSQRYMYRMPDPVVGEVCEMVYQRLFGESSSNVTPYRGDRYTSLRLRRRTMQADESLSRIYLFLLCFMVMCLLLF

SEQ ID NO: 646 - protein, 213 aa, Oryza sativa
ENSTNRQVTFCKRRAGLLKKARELSILCEADIGIIIFSAHGKLYDLATTGTMEELIERYKSASGEQANACGDQRMDPKQEAMVLKQEINLLQKGLRYIYGNRANEHMTVEELNALERYLEIWMYNIRSAKMQIMIQEIQALKSKEGMLKAANEILQEKIVEQNGLIDVGMMVADQQNGHFSTVPLLEEITNPLTILSGYSTCRGSENGLFLLT

SEQ ID NO: 647 - protein, 164 aa, Lupinus polyphyllus
MARPQQRYRGFRQRHWGSWVSEIRHSILKTRIWQGTFESAEDAARAYDEAARLMCGTRARTNFPYNPNASQSSSSKLLSATLIAKLHRCYMASLQMTRPSSLPEAPRIIASPNNAVKGIGADAMLLPKKREQEEQETGGNLDFKKVKVECSQQFKPLEEDHIAQ

SEQ ID NO: 648 - protein, 360 aa, Solanum lycopersicum
MRERQRWRAEEDALLRAYVRQYGPKEWPLVSQRMNTPLNRDAKSCLERWKNYLKPGIKKGSLTEDEQRLVIQLQAKHGNKWKKIAAEVPGRTAKRLGKWWEVFKEKQQREQKENNKVVDPVDEGKYDHILETFAEKIVKERSVPGLLMATSNGGFLHADASTPTPQTLLPPWLSNSSAPSTVRSSSPSVTLSLSPSTVPPTPTPGIPWLQTDRGPDNAPLILSSFPHHSVAPCGENPFITELAECCKDLDEGHRTWTAHKKEAAWRLRRVELQLESEKASKVREKMEEIEAKMKALREEQKATLDRIEAEYKEQLAGLRRDAEAKEQKLAEQWTSKHMRLAKFLEQMGCQSRLAEPNGGR

SEQ ID NO: 649 - protein, 236 aa, Glycine max
MVSRENTNWLFDYGLIDDIPVPDATFGVNSSAFTWPPNALNASSNVGVEIDGSLGDSDSLKESGSKKRVRSESCAASGSKACREKLRRDRLNDKFVELGAILEPGRPAKTDKAAILIDAVRMVTQLRGEAQKLKDTNQGLQEKIKELKAEKNELRDEKQRLKAEKEKLEQQLKSLNAQPSFMPPPAAMPAAFAAQGQAHGNKLVPFISYPGVAMWQFMPPAAVDTSQDHVLRPPVA

SEQ ID NO: 650 - protein, 269 aa, Triticum aestivum
MQILNEQLAAPSTGLMVKESASPGSGSGSAGGAAEKMGRGRIEIKRIENTTNRQVTFCKRRNGLLKKAYELSVLCDAEVALIVFSGRGRLYEYSNNSVKATIERYKKATSDTSSAGTVAEINAQHYQQESAKLKQQITTLQNSNRTLIGDTMATMSHRDLKQLEGRLDKGLGKIRARKNELLCAEIEYMQRREMELQNNNFFLREKVAETERGQQQTLNMMGAASTSNEYEQNMIHCDPRTFLQFNFMQQHPQYCSQQEDRKSFNSVGR

SEQ ID NO: 651 - protein, 527 aa, Arabidopsis thaliana
MYQAAFSKSSYMYQYIVGIEAGNERKPGLYCCNYCDKDLSGLVRFKCAVCMDFDLCVECFSVGVELNRHKNSHPYRVMDNLSFSLVTSDWNADEEILLLEAIATYGFGNWKEVADHVGSKTTTECIKHFNSAYMQSPCFPLPDLSHTIGKSKDELLAMSKDSAVKTEIPAFVRLSPKEELPVSAEIKHEASGKVNEIDPPLSALAGVKKKGNVPQAKDIIKLEAAKQQSDRSVGEKKLRLPGEKVPLVTELYGYNLKREEFEIEHDNDAEQLLADMEFKDSDTDAEREQKLQVLRIYSKRLDERKRRKEFVLERNLLYPDQYEMSLSAEERKIYKSCKVFARFQSKEEHKELIKKVIEEHQILRRIEDLQEARTAGCRTTSDANRFIEEKRKKEAEESMLLRLNHGAPGSIAGKTLKSPRGLPRNLHPFGSDSLPKVTPPRIYSGLDTWDVDGLLGADLLSETEKKMCNETRILPVHYLKMLDILTREIKKGQIKKKSDAYSFFKVEPSKVDRVYDMLVHKGIGDST

SEQ ID NO: 652 - protein, 214 aa, Glycine max
  misc_feature (176)..(176): Xaa can be any naturally occurring amino acid
MEDNNEECIAGLCLGLGLGLGSGHVPKKNKQKENKAVVCLDLAFELCPKGEKAVNNVNHHHDKVERISLERIHDYPNEKSTDSDNSNNNGCRKKLRLSKDQSSMLENSFKQHSTLNPVQKQALADRLNLKTRQVEVWFQNRRARTKLKQTEVDRELLKKHCQNLSDENKRLKKELXGTTCHLRLDRRHHAFHYSKPATLTTMCSSCDRELKLVN

SEQ ID NO: 653 - protein, 179 aa, Dendrobium grex Madame Thong-In
LTLTKCCMQRGSHFRSRSGSQEARSGSSMSRCNSMDTKFCYYNNYNVNQPRHFCKNCQRYWTAGGSMRNVPVGAGRRKNKHTGSVYRHTVITPDSLASLQVDGPDLVDHKPLSPFKVNGTILKFGPDAPLCESMASILNLGEQNLSSQLDFTAGAENREETSCSSACKPVKKKDITQHN

SEQ ID NO: 654 - protein, 440 aa, Saccharomyces cerevisiae
MSLSNKTVKELRQLLKERYTVEDELTESIALSSMRFKPSQEPEFHALSQSSLLKTKLKQQSSTDIPSYTHVLISKLSCEKITHYAVRGGNIEIMGILMGFTLKDNIVVMDCFNLPVVGTETRVNAQLESYEYMVQYIDEMYNHNDGGDGRDYKGAKLNVVGWFHSHPGYDCWLSNIDIQTQDLNQRFQDPYVAIVVDPLKSLEDKILRMGAFRTIESKSDDNSATSYYELETIIFDSELNRALFETKLNLHCVIEDDESEQISLNRLIDSMKQYSYLMDSKNVRTRIKLATTSERVSNENKKNIDYQNRSTRSQFCLNTQRGDSTETSSFGSMFSGDNTSDVDMEDRNLTEFDSTDTSLCINGEPSIHVNRVERSSRSTDNFHNSKKRMNSNQERCHDEGNDMLQRNVLETDYARAKNRILASKIKQYERLRFYKDTFTL

SEQ ID NO: 655 - protein, 235 aa, Arabidopsis thaliana
MPTLYKKAGCLGIREFMVRGKIEIKKIENVTSRQVTFSKRRSGLFKKAHELSVLCDAQVAAIVFSQSGRLHEYSSSQMEKIIDRYGKFSNAFYVAERPQVERYLQELKMEIDRMVKKIDLLEVHHRKLLGQGLDSCSVTELQEIDTQIEKSLRIVRSRKAELYADQLKKLKEKERELLNERKRLLEEQNRERLMRPVVPATLQICDKGNTEGGHRTKHSSEVETDLFIGLPVTRL

SEQ ID NO: 656 - protein, 354 aa, Oryza sativa (japonica cultivar-group)
MVAVPVVADDGGGGHGAKGEESVSGSVAGISPSILIIAVIVVVMLLASVSIHYFIRHLCRRSSASAAASSSAPVLPVVVRPASSAAVGEQVVGKASAERAAEMERLISRLPLFTLASSLAALPKSSRDCAVCQSAFRDDDELRLLPACRHAFHSRCVDPWLRANPSCPLCRASIALPHPPLPDLLRVELGSVSSRRSNPNSAAAVASAPPEGAAVRAYPLPTLPNSEYLVEEELEVVIKQPAAAAAPRTGEPSQHPLPAAQAERGQPSSVTPTASFSSARSQERWSNRWSSRWSSRWSSGRWSSRYDAGTVTAAATAEWWWDMDGGAAPAARRREVEEQGNAFHGFMRWLTGAY

SEQ ID NO: 657 - protein, 245 aa, Zea mays
HGGAAPDRMRQGGGERDGAENQRWPPWLKPLLGTSFFGQCKLHADAHKSECNMYCLACMNGALCSQCLAYHRDHHAIQIRRSSYHDVIRVSEIQKVLDISGVQTYIINSARVVFLNERPQPRPGKGVTNTCEVCQRSLLDTFRFCSLGCKIVGTSGDLRVRKKQAVVKKNKKKKQAQQQQQHRGAALDSEDDSSSTSTSRGSDRSSVVQSFTPSTPPATPNSFRTGKRRKGVPHRSPFGSLVLEF

SEQ ID NO: 658 - protein, 138 aa, Oryza sativa
  misc_feature (48)..(48): Xaa can be any naturally occurring amino acid
  misc_feature (54)..(54): Xaa can be any naturally occurring amino acid
LWASPWAPAATGGREKVETNRAAGIRHEASCRIRHEAKLKQTEVDCEXVKRCCXTLTEENRRLHRELQQLRALTHSTAAGFFMATTLPVPAATLSICPSCERLATAAAAGASPTAAADRTNKPTAPHLFSPFAKSAAC

SEQ ID NO: 659 - protein, 328 aa, Oryza sativa (japonica cultivar-group)
MDGRFPLPPASGGGRGHHRRAHSETFLRLPDADLLLDPEGDFSFSDLDFPSLSDDSPAISDPTPPPPPPMAATPAPAPRPPGGAHMRSLSLDTAFFEGFSLQGGGGGGGGGGSGGSGGHKRSGSMDGVNSPFEGESALSGGLPDYAKKAMPAERIAELALIDPKRAKRILANRQSAARSKERKIKYTSELERKVQTLQTEATTLSAQLTLLQRDTSGLTAENRELKLRLQSMEEQAKLRDALNEALREEVQRLKIAAGQAPNMNGNPFNGGLQQQIPPYYTQQQQQQQQMPYLGGHHAQQRHPSHQQSSSNGGQSLSGQSLNDSMDFM

SEQ ID NO: 660 - protein, 514 aa, Petroselinum crispum
MSSSLGDLLAQPNNDDFGSNWGFENQKTKSFANQSLPFSPPPVSPSSYFSFLDSPIQNNNYTIVSSSGNGTMNAQSFKEENQNFSDFSFPAQTRPASSTSSSFIPANTNLVEDSLKRKQGGWNFEEPAKKNDFLMDNASVTSDIATLQRISPEMTMNHANMQSNAALQSNLNNYAQSSQSSQTNRDQSKLDDGYNWRKYGQKQVKGSENPRSYYKCTYLNCPTKKKVETTFDGHITEIVYKGNHNHPKPQSTKRSSSQSYQNSIGTMPESSLLENGRSEPVTTPENSSLSFGEDDLFEQGSMNKPGDDDENEPDSKRWKGEYESNEPMSSLGSRTVREPRIVVQTTSDIDILDDGYRWRKYGQKVVKGNPNPRSYYKCTQVGCPVRKHVERASHDLRAVITTYEGKHNHDVPAPRGSGSYPAVNRPSDNTTSAPTAIRPTTNYLNPLQNPRAQPANGQAPFTLEMLQRPRSYEFSGFTNTSNTYAINQNQQASGQFSTAKDEPDVDSFFDSFLA

SEQ ID NO: 661 - protein, 487 aa, Arabidopsis thaliana
MGRSRGNFQNFEDPTQRTRKKKNAANVENFESTSLVPGAEGGGKYNCDYCQKDITGKIRIKCAVCPDFDLCIECMSVGAEITPHKCDHPYRVMGNLTFPLICPDWSADDEMLLLEGLEIYGLGNWAEVAEHVGTKSKEQCLEHYRNIYLNSPFFPLPDMSHVAGKNRKELQAMAKGRIDDKKAEQNMKEEYPFSPPKVKVEDTQKESFVDRSFGGKKPVSTSVNNSLVELSNYNQKREEFDPEYDNDAEQLLAEMEFKENDTPEEHELKLRVLRIYSKRLDERKRRKEFIIERNLLYPNPFEKDLSQEEKVQCRRLDVFMRFHSKEEHDELLRNVVSEYRMVKRLKDLKEAQVAGCRSTAEAERYLGRKRKRENEEGMNRGKESGQFGQIAGEMGSRPPVQASSSYVNDLDLIGFTESQLLSESEKRLCSEVKLVPPVYLQMQQVMSHEIFKGNVTKKSDAYSLFKIDPTKVDRVYDMLVKKGIAQL

SEQ ID NO: 662 - protein, 247 aa, Triticum aestivum
MKRPGGGNPSSHLQMASPNDMDYGVVGMEADGDAEEEMMACGGGGGGCGGGEKKRRLSAEQVRALERSFEVENKLEPERKARLARDLGLQPRQVAVWFQNRRARWKTKQLERDYNALRHSYDALRVDHDALRRDKEALLAEIKDLKGKLGDEEAAASFTSVKEEPAASDGPPPAGMGSSDSDSSGVLNDTDALGAAAAGHGQVFLHGNFLKVEEDETGFLDDEEPCGGFFADEPPLAWWTEPTDPWK

SEQ ID NO: 663 - protein, 415 aa, Zea mays
MDFSCFQPHTGICSYLPFDSYMQHDGQYELHLHPADHHPLEVTGDYTSATFDDLGHEFFAEREIEKPIFNRTSSIGRRVGSQLPLPTIKTEVSHLIDSGLVSCKAYEINDRFLARKKTSLKKANVVKGQWTPEEDRKLVKLVEQFGLRKWSYIAQLLPARVGKQCRERWHNHLRPNIKKDIWSDEEDMVLIEAHKEVGNKWAEIAKRLPGRTENSIKNHWNATKRRQFARRRSRTSSKAPKPGTLLQSYIEGLGIVGPSDKSAAPLSEPTLSPEAPGAKSAKTGGTTLPEEHSPPSNMLDSQGVLLPSEELLAPICDELLDGMCGGLFDCTNEDAFFRVCAVDDDIDVSYIFDHAIKVDPEIDMEMMMMWDDDALACTAGPAAGTAHVETVHVKEEMDLMEMVAATQNCGEAENH

SEQ ID NO: 664 - protein, 454 aa, Oryza sativa
MPNLGNGVKTNNDLPLVSDKLLIVKGIPFCPNNSKKNDLQGISRPDGRIEIDSMTEDVKTEPDGSVPEKILKKPDKILPCPRCNSMETKFCYFNNYNVHQPRHFCRNCQRYWTAGGAMRNVPVGAGRRRNKHVSKYCQAMMTCNNTVAPGDVSDVVHHQVITHGSSLLPATLKENETPTEFISEVPPCKSSASILDIGEPNDTDLVPLASGDNKEEKSCASSVVVSSCSENLMPDNAIMKEPNNRSGCCNGVALPFPTGPALVLPWSLGWNSVALMPATQCSMQPVLGLKDGIPCPPSWPPQLMVPAPGICTPVVPIPLVPPLWSCFPGWPNGMWNAQCPGGNTTVLPSTAPNKISCSGSSSLVLGKHSREESLQEEEKTRNYLWVPKTLRIDDPAEAAKSSIWATLGIKPDDKGIFKSFQPNVAKNGTAPESPQALQANPAAFSRSQSFQETT

SEQ ID NO: 665 - protein, 236 aa, Oryza sativa (indica cultivar-group)
MKGEFVPPWLELLLSTQFFNTCTSHHNSPRNECNLFCIDCQAPEAAFCYYCRSCHHSSHRVIQIRRSSYHDVVKVSELEDILDISNVQTYVINSARVVFLNERPQLRGCGVLAIKSSPSSLSSYNCETCSRVLLDAFRFCSLGCNLIGIKNDVETGLANDGIAHNDKDIEIDGSNGTANTNGTGKGIEICGNNGTIANTGNEDEICSDASKNKEILSSTRVVRHRRKGIPRRAPFF

SEQ ID NO: 666 - protein, 198 aa, Glycine max
MDKSEQTQQQHQHGMGVATGASQMAYSSHYPTAPMVASGTPAVAVPSPTQAPAAFSSSAHQLAYQQAQHFHHQQQQHQQQQLQMFWSNQMQEIEQTIDFKNHSLPLARIKKIMKADEDVRMISAEAPVIFAKACEMFVLELTLRSWIHTEENKRRTLQKNDIAAAISRNDVFDFLVDIIPRDELKEEGLGITKATIAL

SEQ ID NO: 667 - protein, 285 aa, Glycine max
MSCNNGMSFFPSNFMIQTSYEDLPPSLSPLLPSCSIPQDLHGFASFLGKRSPVEGLEAGNIMNGEEDYSDDGSQMGEKKRRLNMEQVKTLEKNFELGNKLDPERKMQLARALGLQPRQIAIWFQNRRARWKTKQLEKDYDTLKRQFDSLKAENDHLQTHNQKLQAEIMSSRNREQTESINLNKETEGSCSNRSDNSSDNFRLDISTAVPSVDSTITGGHPPAPQTVGRHFFPPATATTTTTTMQFFQNSSSGQSMVKEENSISNMFCAMDDHSGFWPWLDQQQYN

SEQ ID NO: 668 - protein, 260 aa, Zea mays
  misc_feature (241)..(241): Xaa can be any naturally occurring amino acid
MSLAPDPADGGAGTGTGTGDDWFLDCGILDDLPAAACGAFPWDASPSSSNPSVEVGSYVNTNDVFKEPNDVFKEPGSNKRLRSGCNDVHVPTSKASREKMRRNKLNDRFLELGSTLEPGKPVKADKAAILSDATRMVIQLRSEAQQLKETNGSLEEKIKELKAEKDELRDEKQKLKLEKESLEHQMKLMTSTPTYMPHPTLMPAPFPQAPLAPFHAQGQAAGQKLMMPFVSYPGYPMWQFXMPPSEVDTSKDSEACPPVA

SEQ ID NO: 669 - protein, 509 aa, Solanum tuberosum
MSIVTCEKAAASLSSSSNMNNDTNGAFCYTPQHQLVTPQYQNPPQQIKKKRNQPGNPDPEAEVIALSPKTLVAANRFFCEICNKGFQRDQNLQLHRRGHNLPWKLKKRENKEVVRKKVYICPESSCVHHDPSRALGDLTGIKKHFSRKHGEKKWKCEKCSKRYAVQSDCKAHFKTCGTREYKCECGTIFSRRDSFITHRAFCETLAMESARSVINGRNPTIFSPQLNLQFQQPHFFNSHEQIQATTFPMKKEQQSSDFRHIEIPPWLITTNSQPFQLGAINHGPSPRSNFSSSSIFPATTRLDQQYTQSGHKDLNLHHPNPNLRGPTLGYDSTGESGAVSPVHISATRLLQKAAQFGATISNKASAVTATAAYTGTVKIPHNTHVSVTSTDSATKQTHQKLSSREDLTSITGPANISGIMTSFSNGFDGSTMFEDAILFGGFNNLNSKKEDEEEDQQLYFNGSMNEEDHILTKDFLGLKPLSHTDDIFNIAALVNTEPHHFKNHKTWQS

SEQ ID NO: 670 - protein, 261 aa, Zea mays
MEAGRMDQPCMASINSQPFVADTEPVKKASGDMPAAPTGSGCFDCNICLDFAAEPVVTLCGHLYCWPCIYEWLRPGVESTASDNGSSARRQCPVCKATLSPDTLVPLYGRGGSSKKSLDGMAIPRRPMVHREAVEQQNARSHVNDQHYHQSTGDSPQHQPLMQAHHHPVPPGFDFIYPPAPVGRGLIHSTAGGVLGGMAEVVLPWVLRGQLPASLHYTSPYHVAAQNVNPRLRRQQMEIERSLHQIWFFLFVFVLLCLLLF

SEQ ID NO: 671 - protein, 172 aa, Arabidopsis thaliana
MALIPPWTRDNDKRFELALVIFPEGSPYFLEYIAEFLQKPLEEVKYYYDAILVYDVVLIESGKYALPKYPEAYYVSLTEATESKHGETNQIPRIIPWTEEEHRVLNLAGVDALRYGKGAWSMISREFVTSTQVASHAQKYDKRQKLDSKKRKRWSVLDITLESTKGKSDFVK

SEQ ID NO: 672 - protein, 418 aa, Oryza sativa (japonica cultivar-group)
MAGVGFVEDMLREQSLLEATCGDLFDHIDDLLDFPKEESAADVLLLDAPAPGSPLSSRIIGGHATMAAAPPPPPQMMALPPPPAPAKDDASALFDAAGALGAEVFDRKDAHIGPCDELDMDMAQLEWLSGLFDDGTIPHEPSFPGVNCAAPIKASALTANAGVVLPDKAEEALFRSSSPISVLEHSGFNVATNGGSSSSSSSSASSSSESFSGSGRAWSAPVSPRPEPPVLVIPARARSKRSRPSAFPAVRGAPAATETTILVPTPMYSSTSSHSDPESIAESNPHPPPMKKKKKAKKPAAPAAASDAEADADAADADYEEGGALALPPGTVRRCTHCQIEKTPQWRAGPLGPKTLCNACGVRYKSGRLFPEYRPAASPTFMPSIHSNSHKKVVEMRQKATRTADPSCDLLQYIRRRD

SEQ ID NO: 673 - protein, 230 aa, Zea mays
MENYHMLFGRPSTQPSSAATSNSYNFMLPTAGSTSGGGGGLRDHDRGGGQHSGHAAGVPSSSSFFAEPSNTSSKDSGAAASSPPPAAGSGRGEEPAAAGTPPAAAEVDGRLQAGKRKGEKKERRPRFAFQTRSQVDILDDGYRWRKYGQKAVKNNKFPRSYYRCTHQGCNVKKQVQRLSRDEGVVVTTYEGTHTHPIEKSNDNFEHILTQMQIYSGMGSTFSSSSHNMFH

SEQ ID NO: 674 - protein, 300 aa, Triticum aestivum
MSGGGGGAAATQGQQDLQLPPGFRFHPTDEELVMHYLCRRCAGLPISVPIIAEVDLYKFDPWQLPRMALYGEKEWYFFSPRDRKYPNGSRPNRSAGTGYWKATGADKPVGTPKPLAIKKALVFYAGKAPKGDKTNWIMHEYRLADVDRSARKKNSLRLDDWVLCRIYNKKGASERPGAGDRTASASPGHAAVGSPPEQKPALLPPYAPQPFSDLAAYYEVRPSDSMPRAHADSSCSEHVLTASCERPEVQSQPRISEWERTFASATPGVNPAGLMLDPAAGLPAGDPLLQDILMYWGKPF

SEQ ID NO: 675 - protein, 235 aa, Medicago truncatula
MENDANENFFSTSSSSTPTSSNSNSNSNSSTNLETKNNPQNGNKKSKKRERNENDTKHPTYRGVRMRAWGKWVSEIREPRKKSRIWLGTYPTAEMAARAHDVAALAIKGHSAYLNFPNLAQNLPRPSTTSPKDIQVAAAKAAAIVFEEIKEDQDQDQDQVSFSTLSSIDNVQESNSSSPSTTATTNDDIDDTLFDLPDLFPDGKNGILSYYSSWHLCAVDSGLRLEEQLSSWEYY

SEQ ID NO: 676 - protein, 159 aa, Solanum lycopersicum
MVRGKTQMRRIENATSRQVTFSKRRNGLLKKAFELSVLCDAEVGLIIFSPRGKLYEFASSSTQEIIRGNKRHTKDRVQPENQAGPQYLQYMQHEAANLMKKIELLETAKRKFLGEGLQSCTLQEVQQIEKQLERSVGTIRARKLQVFKEQVERLKKKKK

SEQ ID NO: 677 - protein, 308 aa, Nicotiana tabacum
GTRLDEEGCIEESGHISEKKRRLSVEQVKALEKNFEVENKLEPERKVKLAQELGLQPRQVAVWFQNRRARWKTKQLERDYGVLKSNFDALKHNYESLKHDNEALLKEILELKSKVYTENGESKGVAVKEEAMESESDDNKVIEQSKPNDNDNNNNNFLENFEEDDEEEEINFENFNVAAAATSTNIFGDNFKDGSSDSDSSAILNEDNSPNAAAISSSGAFLISTNGNGNGNGSSTSLNFCFQFTESSSKSNLGDGQKGNNNYYQPQQYVKMEEHNFFNGEESCSTLFTDEQAPTLQWYCPEDWNWKE

SEQ ID NO: 678 - protein, 247 aa, Brassica napus
  misc_feature (160)..(160): Xaa can be any naturally occurring amino acid
  misc_feature (164)..(164): Xaa can be any naturally occurring amino acid
  misc_feature (166)..(166): Xaa can be any naturally occurring amino acid
  misc_feature (171)..(171): Xaa can be any naturally occurring amino acid
  misc_feature (174)..(175): Xaa can be any naturally occurring amino acid
  misc_feature (201)..(201): Xaa can be any naturally occurring amino acid
  misc_feature (206)..(206): Xaa can be any naturally occurring amino acid
  misc_feature (228)..(229): Xaa can be any naturally occurring amino acid
NSSALWRSIRTLPPMEGSFLISDAQQAHEEVKQKPNLITGPAGSQANESGCFDCNICLDTALDPVVTLCGHLFCWPCIYKWLHVQLSSLSTDHHRHNNCPVCKSNIAITSLVPLYGRGMSSSVNSKEQDSESTVIPRRPAPSTTLNNPIASEPSLNQTMXPTFXSXRYSPXGFXXTESTDLANAVMMSLLYPVIGMFGDMXYTRVXGTFTNAIAQPYQSQRMMQTDKXXNRVSIFFLCCIILCLLLF

SEQ ID NO: 679 - protein, 367 aa, Arabidopsis thaliana
MSSSSPTQLASLRDMGIYEPFQQIVGWGNVFKSDINDHSPNTATSSIIQVDPRIDDHNNNIKINYDSSHNQIEAEQPSSNDNQDDDGRIHDKMKRRLAQNREAARKSRLRKKAYVQQLEESRLKLSQLEQELEKVKQQGHLGPSGSINTGIASFEMEYSHWLQEQSRRVSELRTALQSHISDIELKMLVESCLNHYANLFQMKSDAAKADVFYLISGMWRTSTERFFQWIGGFRPSELLNVVMPYLQPLTDQQILEVRNLQQSSQQAEDALSQGIDKLQQSLAESIVIDAVIESTHYPTHMAAAIENLQALEGFVNQADHLRQQTLQQMAKILTTRQSARGLLALGEYLHRLRALSSLWAARPQEPT

SEQ ID NO: 680 - protein, 128 aa, Brassica napus
  misc_feature (125)..(125): Xaa can be any naturally occurring amino acid
MREDDSDWFSRWEQDLPSPDELIPLSQSLISPDLALAFDIRSPGQQPLHHHQSAPPTPSQANSSAEFAADSSDLGGAGDEPARTLKRPRLVWTPQLHKRFVDAVAHLGIKNAVPKTIMQLMSVDXLTR

SEQ ID NO: 681 - protein, 339 aa, Gossypium hirsutum
MTTVYDPSHHLTSKKLCFKDLEIPPRKKQLHCCHNAAAMELPHHEARLHKYLPSNEDDDGTDDPYGTDHFRMYEFKVRRCTRSRSHDWTDCPFAHPGEKARRRDPTRYQYSSTICSDFRRGGGCPRGDDCEFAHGVFECWLHPTRYRTEACKDGKNCKRKVCFFAHSSRELRLLPESQPPYKNSDKNYNHCCLFCRSVTSSSSLSPTSTLLGLSHFSRSPSLSPPLSPLKHQQRTPRYGGDRISKFGTEMTSSYDDVLLKEVMSYLGTMNLSEVSSPMATTANTNIPWFDVSFKGAPSTVSPSGSGEYFNGGGDDEKNNGNGVVLDHDLDLGWVNELLM

SEQ ID NO: 682 - protein, 351 aa, Triticum sp.
MSDVTAVMDLEVEEPQLALPPGFRFHPTDEEVVTHYLTRKVLRESFSCQVITDVDLNKNEPWELPGLAKMGEKEWFFFAHKGRKYPTGTRTNRATKKGYWKATGKDKEIFRGKGRDAVLVGMKKTLVFYTGRAPSGGKTPWVMHEYRLEGELPHRLPRTAKDDWAVCRVFNKDLAARNAPQMAPAADGGMEDPLAFLDDLLIDTDLFDDADLPMLMDSPSGADDFAGASSSTCSAALPLEPDAELPVLHPQQQQSPNYFFMPATANGNLGGAEYSPYQAMGDQQAAIRRYCKPKAEVASSSALLSPSLGLDTAALAGAETSFLMPSSRSYLDLEELFRGEPLMDYSNMWKI

SEQ ID NO: 683 - protein, 47 aa, Oryza sativa (japonica cultivar-group)
LSKEQSAFLEESFKEHSTLNPKQKLALAKQLNLRPRQVEVWFQNRRA

SEQ ID NO: 684 - protein, 243 aa, Zea mays
DRLASTRIAIGKWTSSNKANVVKGQWTAEEDRKLVKLVEQFGLRKWSYIAQLLPGRVGKQCRERWHNHLRPNIKKDIWNDEEDSVLIQAHKEVGNRWAEIAKRLPGRTENSIKNHWNATKRRQFARRRSRASASTSKGPPKPGSLLQNYIKGLGIGPVISNSSPETPGGARSANQAGETTLEVERSPLCDVLVDSSQCTTVLPPTSVHGYDEYSNCSGESHQSCEVLLAPIISCGDDAFSVGM

SEQ ID NO: 685 - protein, 176 aa, Candida albicans SC5314
MGRYSVKRYKTKRRTRDLDLIYNDLSSPESINKLKNQPLDELKPGLGQYYCIQCAKYFENQISLDRHTKSKIHKRRVKSLNERPYTPLEAEAAAGVNMEKFIASVEKYKQLENDKQENKHQYDKLINQKKDNLDAIITGIPSEEFQQQQQQQQQEELQDANQGTAINDQEEVMMID

SEQ ID NO: 686 - protein, 514 aa, Capsella rubella
MDNSRTRQNMNGSAAATNWSQQNGRTSTSSLEDLEIPKFRSFAPSSISISPSLVSPSTCFSPSVFLDSPAFVSSSAHVLASPTTGALITNESNTKLINEGEKKDNNINFFDFSFQTQSSGVSAPTTTTTTTNNSSIFQSQEQQRKNQSDQWSQNESRQNNQAVSYNGREQRKGEDGYNWRKYGQKQVKGSENPRSYYKCTFPSCPTKKKVERSLEGQITEIVYKGSHNHPKPQSTRRSSSSSSSTFHSAVYNASLDHHRQASSDQPNSNNSFHHSDSFAMQQDDNTTSDSVGDDEFEQGSSIVSRDEEDCGSEPEAKRWKGENETNGGNGGGSKTGREPRIVVQTTSDIDILDDGYRWRKYGQKVVKGNPNPRSYYKCTTIGCPVRKHVERASHDMRAVITTYEGKHNHDVPAARGSGYATNRAPQDASSVPIRPAAIAGHSNSTTSSPAPYTLQTLHNNNTNSTARSWLRYDNNNNNNNNNPQTLQNCVCGDAFSRATEEPNEETSFFDSFMP

SEQ ID NO: 687 - protein, 362 aa, Brassica rapa subsp. pekinensis
MNTTSTHFVPPRRFEIYETTLNQVSMWEESFKNNGGIFTPNSIIIPTDAKLDSLSEDTSHGTPHKFDQEASTSRHPDKTQRRLAQNREAARKSRLRKKAYVQQLETSRLKLIHLEQELDRARQQGFYEGNRVDTNALGFSDKMSSGIVAFEMEYGHWVEEQNRQISELRTVLQGQVSDVELRLLVDNAMKHYFQLFRMKSAAAKIDVFYIMSGMWKTSAERFFMWIGGFRPSELLKVLLPHFDPLMDQQVLDVCNLRQSCQQAEDAVSQGMEKLQHTLADSVAAGNLGEGSYIPQITCAMERLEALVSFVNQADHLRHETLQQMHRILTTRQAARGLLALGEYFQRLRALSSSWATRQREPT

SEQ ID NO: 688 - protein, 282 aa, Arabidopsis thaliana
MATSSSSYGIEQLQKGCYYEWMSVQAKHIVDLKEALMSHRSKEDHKLEELVGKIVNDFQKYTEKRSELSRRSCSSYFAPSWNSPLENGLLWMGGCRPSSFIRVIYSLCGSQAETQLSQYLLKIDENVEVNHGGSMSDLNASQLAKINDLHIKVIEKEDKITKKSANLQENVADMPIAIAAYATDLMNGDVVVEDALDKYEEGMAVLMVEADKLRFETLRKIVDVVTPVQAAEFLLAGKRLHISLHEWGRVREEQRFGCVRTDAAAATGGAGTEKSKRSSLLM

SEQ ID NO: 689 - protein, 200 aa, Helleborus orientalis
AGILKKAKELTVLCDAQVSLLMFSSSGKVHEYTSPSTTMKNVYDRYQQVLGVNLWQSHYERLQDNLKKQKEINSKLRREIRQRNGEDLDNLSCQQLRGLEQNMEKSVNCVRARKFHVLHTQTETFKKKVKHLEQEQTNLFRTCERDNGDEHYAVIGPEGDYQSAIGLANGGSHIFAFRLQPSQANIQDEEGYDPYSLSLA

SEQ ID NO: 690 - protein, 198 aa, Gossypium barbadense
MAPKKDGVSKRVFNKGSWTAEEDRRLAKYIEIHGAKRWKTIAIKSGLNRCGKSCWLRWLNYLRPNIKRGNISDEEEDLIIRLHKLLGNRWSLIAGRLLGRTDNEIKNYWNSHLSKKIINHDVRTEQTSSSEQIVPHKAWETVQMEEEEVVKGSDEIENSEFSIDVDEFFDFTTEGCFSLDWVNKFLELDDQQDPLAMV

SEQ ID NO: 691 - protein, 335 aa, Oryza sativa
MIQAMASHAGGSGGGGGGSGRDAGSAQRGPMQGLARQGSLYGLTLNEVQSQLGEPLLSMNLDELLKSVFPDGADLDGGGGGGGIAGQSQPALGLQRQGSITMPPELSKKTVDEVWKGIQDVPKRGAEEGGRWRRERQPTLGEMTLEDFLVKAGVVTDPNDLPGNMDVVGGAAAAAAGTSDLNAGAQWLQQYHQQALEPQHPSIGAPYMATHLAPQPLAVATGAVLDPIYSDGQITSPMLGALSDPQTPGRKRCATGEIADKLVERRQKRMIKNRESAARSRARKQAYTNELENKVLRLEEENERLKKQKELDEILNAAPPPEPKYQLRRTSSAAF

SEQ ID NO: 692 - protein, 190 aa, Glycine max
  misc_feature (28)..(28): Xaa can be any naturally occurring amino acid
  misc_feature (130)..(130): Xaa can be any naturally occurring amino acid
  misc_feature (171)..(171): Xaa can be any naturally occurring amino acid
GGSSSGPNRSSDSCRGWRRLFLRGINVXNKLPSPVDTKEEGGIYAANSTISCVSRKKSDIKPVDEKHDLDRNCSHGIMKEEDPDTSGKKLGLSLDLSSILEESFEEHYSLGLRAKLALAKQLWLRPRRVXVRFRNRKARNKLNHTEGDSRILERCCENLNEENFRVRKAVXELGARKLSPSFTCQRNPPR

SEQ ID NO: 693 - protein, 1226 aa, Oryza sativa (indica cultivar-group)
MAGNEWINGYLEAILDSGGAAGGGGGGGGGGGGGGGGGGGGGGGGVDPRSPAAGAASPRGPHMNFNPTHYFVEEVVKGVDESDLHRTWIKLELEGILRISARRKEQEQVRRETSEDLAEDLFEGEKADTVGELAQQDTPMKKKFQRNFSELTVSWSDENKEKKLYIVLIRSYTAYFTHWCHSVYATKLQNFTEFLYSLFYFSLHGLVRGDNMELGRDSDTGGQVKYVVELARALAMMPGVYRVDLFTRQVSSPEVDWSYGEPTEMLTSGSTDGEGSGESAGAYIVRIPCGPRDKYLRKEALWPYLQEFVDGALAHILNMSKALGEQVSNGKLVLPYVIHGHYADAGDVAALLSGALNVPMVLTGHSLGRNKLEQIMKQGRMSKEEIDSTYKIMRRIEGEELALDAAELVITSTRQEIDEQWGLYDGFDVKLEKVLRARARRGVSCHGRFMPRMVVIPPGMDFSSVVVPEDTSDGDDGKDFEIASPRSLPPIWAEVMRFLTNPHKPMILALSRPDPKKNITTLVKAFGECRPLRELANLILIMGNRDDIDEMSAGNASVLTTVLKLIDKYDLYGSVAFPKHHKQSDVPEIYRLTGKMKGVFINPALVEPFGLTLIEAAAHGLPIVATKNGGPVDIKNALNNGLLVDPHDQHAIADALLKLVADKNLWQECRKNGLRNIQLYSWPEHCRTYLTRIAGCRIRNPRWLMDTPADAAAEEEEALEDSLMDVQDLSLRLSIDGERGSSMNDAPSSDPQDSVQRIMNKIKRSSPADTDGAKIPAEAAATATSGAMNKYPLLRRRRRLFVIAVDCYGDDGSASKRMLQVIQEVFRAVRSDSQMSRISGFALSTAMPLPETLKLLQLGKIPPTDFDALICGSGSEVYYPGTAQCVDAGGRLRPDQDYLLHINHRWSHDGAKQTIAKLAHDGSGTNVEPDVESCNPHCVSFFIKDPNKVRTIDEMRERMRMRGLRCHLMYCRNATRLQVVPLLASRSQALRYLFVRWGLSVGNMYLIVGEHGDTDHEEMLSGLHKTVIIRGVTEKGSEQLVRSSGSYQREDVVPSESPLIAFTKGDLKADEIMRALKEVTKAASGMDWQWPLCKTAYWFQSRVYTNMEEKEEMTMLSLGVGAASKHSISNRKFRLKEVTDHKFNLGDQDHNSGHVRKKLRLSEEQLTVLENMYEAGSNLDQALKQGLAEKLNIKPRQVEVWFQNRRARTKHKQIEEECKNRGGWRA

SEQ ID NO: 694 - protein, 200 aa, Nelumbo nucifera
GGIFKKAAELTVLCDAEVSLIMFSSTGKLSEYVSHTATTKKIFDRYQQVSGINLWNSHYERMQEHLSKQKEVNNNLRREIRQRMGEDLDDLSVDELRGLEQNMENSLKVVRERKYHVISTQTDTCKKKIRNLQDTNASLLRQLEERDEIPHFGFVDNGGDYESALGLANNGSHLFAFRLQPNQPNLQDGGIYGSYDLRLA

SEQ ID NO: 695 - protein, 1723 aa, Helicobacter pylori
MNEENDKLETSKKIQQDSPQDLSNEEATEANHFEDLLKEESSDNHLDNSAETKSNFDEDKLEETQTQMDSGGNETSESSNGSLADKLFKKARKLVDDKRPFTQQKSLDEEAQKLNEEDDQENNEYQEETQTGLIDDETSKKAQQDSPQDSSNEEATEANHFEDLLKEESSDNHLDNSAETKSNFDEDKLEEITDDSNDQEIIKGSKKKYIIGGIVVAVLIVIILFSRSIFHYFMPLEDKSSRFSKDRNLYVNDEIQIRQEYNRLLKERNEKGNMIDKNLFFNDDPNRTLYNYLNIAEIEDKNPLRAFYECIGNGGNYEECLKLIKDKKLQDQMKKTLEAYNDCIKNAKTEEERIKCLDLIKDENLKKSLLNQQKVQVALDCLKNAKTDEERNECLKLINDPEIREKFRKELGLQKELQEYKDCIKNAKTEAEKNECLKGLSKEAIERLKQQALDCLKNAKTDEERNECLKNIPQDLQKELLADMSVKAYKDCVSKARNEKEKKECEKLLTPEARKKLEQQVLDCLKNAKTDEERKKCLKDLPKDLQSDILAKESLKAYKDCVSQAKTEAEKKECEKLLTPEAKKLLEEEAKESVKAYLDCVSQAKTEAEKKECEKLLTPEAKKKLEEAKKSVKAYLDCVSQAKTEDEKKECEKLLTPEAKKLLEQQALDCLKNAKTEADKKRCVKDLPKDLQKKVLAKESVRVYLDCVSRAKNEAERKECEKLLTPEARKLLEEAKKSVKAYKDCVSRARNEKEKKECEKLLTPEARKLLEEAKKSVKAYLDCVSQAKTEDEKKECEKLLTPEAKKLLEEAKKSVKAYLDCVSQAKTEDEKKECEKLLTPEAKKLLEQQALDCLKNAKTEADKKRCVKDLPKDLQKKVLAKKSVKAYLDCVSRARNEKEKKECEKLLTPEAKKLLEEAKESLKAYKDCLSQARNEEERRACEKLLTPEARKLLEEAKKSVKAYLDCVSQAKNEAERKECEKLLTPEAKKLLEEAKESLKAYKDCLSQARNETERRACEKLLTPEARKLLEQEVKKSVKAYLDCVSRARNEKEKQECEKLLTPEARKFLEKQALSCLEKARNEEERKACFKNLPKDLQKNVLAKESLKAYKDCLSQARNEEERRACEKLLTPEARKLLEQEVKKSVKAYLDCVSRARNEKEKQECEKLLTPEARKLLEKELQQKDKAIKDCLKNADPNDRAAIMKCLDGLSDEEKLKYLQEAREKAVADCLAMAKTDEEKRKCQNLYSDLIQEIQNKRAQNKQNQLSKTERLHQASECLDNLDDPTDQQAIEQCLEGLSDSERALILGIKRQADEVDLIYSDLRNRKTFDNMAAKGYPLLPMDFKNGGDIATINATNVDADKIASDNPIYASIEPDITKQYETEKTIKDKNLEAKLAKALGGNKKDDDKEKSEKSTAKAKSESNKIDKDVAETAKNISEIALKNKKEKSGDFVDENGNPIDDKKKEEKQDETSPVKQAFIGKSDPTFVLAQYTPIEITLTSKVDATLTGIVSGVVAKDVWNMNGTMILLDKGTKVYGNYQSVKGGTPIMTRLMIVFTKAITPDGVIIPLANAQAAGMLGEAGVDGYVNNHFMKRIGFAVIASVVNSFLQTAPIIALDKLIGLGKGRSERTPEFNYALGQAINGSMQSSAQMSNQILGQLMNIPPSFYKNEGDSIKILTMDDIDFSGVYDVKITNKSVVDEIIKQSTKTLSREHEEITTSPKGGN

SEQ ID NO: 696 - protein, 253 aa, Oryza sativa (indica cultivar-group)
MSSHDFARRVPKRRRTNKLLSQLLPDLNSLPAEGADDGGSPSSSVLVSHAQTSAVAVAGTSQHLVPAVVAGPHIGMSSCPIIVDDIDDDVVIYSASSFPQVRQQAPRTEPVVTIEDDSETTPGQAGDAVDEHVDILLSLTLGRYPRHGHQRSSNISTSPVIHIIDTPSNVLKLEFLQYTYQALPEPEKAVPKEPTFNCPVCMNELVEPSSTICGHIFCKQCIKASIQAQKKCPTCRRKLTMNNFHRVYLPSAE

SEQ ID NO: 697 - protein, 495 aa, Oryza sativa
MAMDTFPFQWPMDPAASSGLDAGFLPPPAAVAPDDGVGYYDPPAGADVDAAALPEFAAAFPPCAPDAAAAVLAMRREEEEVAGIRLVHLLMSCAGAIEAGDHALASAQLADSHAALAAVSAASGIGRVAVHFTTALSRRLFPSPVAPPTTDAEHAFLYHHFYEACPYLKFAHFTANQAILEAFHGCDHVHVIDFSLMQGLQWPALIQALALRPGGPPFLRITGIGPPSPTGRDELRDVGLRLADLARSVRVRFSFRGVAANSLDEVRPWMLQIAPGEAVAFNSVLQLHRLLGDPADQAPIDAVLDCVASVRPKIFTVIEQEADHNKTGFLDRFTEALFYYSAVFDSLDAASASGGAGNAMAEAYLQREICDIVCGEGAARRERHEPLSRWRDRLTRAGLSAVPLGSNALRQARMLVGLFSGEGHSVEEADGCLTLGWHGRPLFSASAWEAAGDGGGDNNNNSNSNVSGSSGSDSNNSGSSNGKSSGARDGSSVCL

SEQ ID NO: 698 - protein, 454 aa, Oryza sativa (japonica cultivar-group)
MAGGGRCSSLLRGFVSLFFLLFIHIGHAGCCFSTGSSTQTLEEDDTGHGADGRGGGGGGSKRRKISPLAFSPSVSSSTVADERSRARRRQVSSLATSVRFYLHRIFSYSSGAKNGAGAPAAEEEDEAVTTTVSSPLAQSSSCLPQRQASSSVVLSTPSSPCASPFLSPLSPQSLSITPAVPSSPHNRQIPQATTRQSSFRSFAARGDVFPCKVCGEVLSKPQQLELHQAMKHSLSELSSLDSSMNIIRMIFLAGWKPAVMPGAGEPPSVRRILRIHHNPRVLTRFEEYRDLVRARAARRCAGAGAAAVEERCVADGNERLRFYCSTMLCTLGAGVCGSPYCCTCSILRHGFAGKQADVDGIATYSSGRAAHASLPDDVEREFAFLQVRRAMLVCRVVAGRVGRGAADDKVAYDSMVPLLPTSSFAAATRGDDDVELLVFNPRAVLPCFVIIYSC

SEQ ID NO: 699 - protein, 389 aa, Oryza sativa (japonica cultivar-group)
MGRAPCCDKKGLKKGPWTPEEDKLLVDYIQANGHGSWRLLPKLAGLNRCGKSCRLRWTNYLRPDIKRGPFTAEEQKSIVQLHGIVGNKWSMIAAQLPGRTDNEIKNYWNTHLKKQLRRMGLDDPPPGPAAGCPAARHMAQWETARLEAEARLSLLSSSGAAATTTITAATTTTSASSSSTTAGARRRRRDVTRGRVPPPLELQHRGLLPQASRGGGGVVVPFAGGRHEGRCEAGGGGGAGRGRLVGGVQRGGGGDHGGGRVPDVPRLRRRGAGPVPRPVRRLLALPAGRLARGVAGDGVQVTQKGVNAPDSRWGQPDEKTNLLPRSDKRPNQSSERFATTPAAQEQPVACGGFIARKEQKWAGQARRPYANDSLLGDTIKCRAIVVLWI

SEQ ID NO: 700 - protein, 201 aa, Lilium longiflorum
ELSVLCDAEVALIIFSNHGRLSEFCSSSSMMKTLERYHKCSYNATEDIIPSKETENSYHEYLKLKTRVDYLQRSQRNLLGEDLGPLSTKELEQLENQLEISLKHIRSTKTQLMLDELSDLKGKEHMLQDANQLLRRKSWKNCSRDSGPSMPSDCQPARPERFFQPLACDSSLQIGFHPVGIDQLNNGVSPQNGDDYAPAWM

SEQ ID NO: 701 - protein, 222 aa, Triticum aestivum
MVRGKTQMKRIENPTSRQVTFSKRRGGLLKKAFELSVLCDAEVALVVFSPRGRLYEFASSSMKNTIERYKTVTKDNLGRQTVQQDIEKVKADAEGLSKKLDALEACKSKLLGQNLEECSIEELQSLEVKIERSLLGIRAMKTRRFEEQLSTLRQKEMTLRQHNEELYSQCQKEQHPASEAAAPPAPATLAALPAPVTLAEQGQQVVDVETDLFLGLPGTGRS

SEQ ID NO: 702 - protein, 114 aa, Oryza sativa (japonica cultivar-group)
TKLKQTEVDCEFLKRCCETLTEENRRLQRELQELRALKFAPPPPSSAAHQPSPAPPAPFYMQLPAATLTICPSCERVGGPASAAKVVAADGTKAGPGRTTTHHFFNPFTHSAAC

SEQ ID NO: 703 - protein, 220 aa, Brassica napus
MESVELSLKNINRKEKPDDFSVDDLLDFSNDDVFVEDETKLKAAGVSVSLNDETTLNRSNELSTHACEDFGSELAVPTDDLAELEWLSNFVEDSYSAPTKKPVWLTGDRRHPVAPVNEGLCFKAPLPVKIRTKRARTGVNVWSLGSSSLTDSSSSSSSSSNPSSPLWLTGAEFLDEKAVKRQKKKKVLEYGGQTQTQTRRGRHCGGHKTPQCRVLPSGAK

SEQ ID NO: 704 - protein, 252 aa, Brassica oleracea var. botrytis
MGRGRVEMKRIENKINRQVTFSKRRNGLLKKAYELSVLCDAEVALIVFSSRGKLYEFGSVGVERTIERYHRCYNCSVTNNRPEESKQNWCQEVAKLKAKYESLVRTNRHLLGEDIGEMGVKQLQALERQLEAALTATRQRKTQVMMEEMEDLRKKERQLGDINKQLKIKFEAGGHAFKSFQDFWPNSAASMAGDPNNSKFPVQPSHPDSVDCNTEPFLQIGFQQHYYVQGEGSSVPKSNVACETNFVQDWFL

SEQ ID NO: 705 - protein, 248 aa, Malus x domestica
MGRGRVELKRIENKINRQVTFAKRRNGLLKKAYELSVLCDAEVALIIFSSRGKLYEFCSSFSMMKTLEKYQSCSYGSLEANLPANETQNSYQDYLMLKARVEVLQQSQRNLLGEDLSHLNTKELEHLEHQLETSLKQIRSRKTQFILDQLSDLQNREQMLVEANKALKRKLEETSVQAPEGMAWEAAGHGPNNIQQTRLPSHSEAFFHPLEGNNSSSQIGYTHMGSDNEMNVGNPGQYVNGYIPGWML

SEQ ID NO: 706 - protein, 457 aa, Zea mays
MASDGHPPEPGKKEDVATTAAGPGANDLDDPQFMCCVCLDLLYKPVVISCGHMSCFWCVHKAMHIFRESHCAVCRQPYIHFPSICQLLHHLLLKLETNDYKRREKEVLEEEKRMQTYSPQIIEFLNYKTNVGSYKENRNEDSKARPPQEVPLNDSVPDEHLKKIKLEDVSCPLCMEMLYQPAVLNCGHVYCVSCLSSLNEETLKCHVCGSLHPGDFPNVCLDLDHFLEEYFPAEYELRGQKVQFKKDQCNRETSSSGTSGRKGSTRALHAEDPSNIHIGVGCDSCGVYPIRGKRYKCQDCTELIGFDLCEACYNSSSKLPGRFNQRHTPNHRMEVDNSALVHRILRHHGIPEEGPEGLMMEVVGPDAMVQILIDNQGMEEGNDEGPGEAAIEEPVGSLGSMSRLSHLFMYNPEMEDGNDEDSGEEAAIEEPVGSLGAMAPLFMYDQEMEDNEEDQAH

SEQ ID NO: 707 - protein, 486 aa, Arabidopsis thaliana
MDLSAKDEFSAEKRNPDNYDSVNNPSGDWRVDSYPSENLISAGPASCSPSQMMDSFGQTLWYDPTSVQAVGYAGFNGGNASSSSFRGSIDRSLEMGWNLPNLLPPKGNGLFLPNASSFLPPSMAQFPADSGFIERAARFSLFSGGNFSDMVNQPLGNSEAIGLFLQGGGTMQGQCQSNELNVGEPHNDVSVAVKESTVRSSEQAKPNVPGSGNVSEDTQSSGGNGQKGRETSSNTKKRKRNGQKNSEAAQSHRSQQSEEEPDNNGDEKRNDEQSPNSPGKKSNSGKQQGKQSSDPPKDGYIHVRARRGQATNSHSLAERVRREKISERMKFLQDLVPGCNKVTGKAVMLDEIINYVQSLQRQVEFLSMKLATVNPQMDFNLEGLLAKDALQLRAGSSSTTPFPPNMSMAYPPLPHGFMQQTLSSIGRTITSPLSPMNGGFKRQETNGWEGDLQNVIHINYGAGDVTPDPQAAATASLPAANMKVEP

SEQ ID NO: 708 - protein, 328 aa, Medicago truncatula
MANKIPRAKPVHFFKIILTQNLHHGKLMMPRKFVEKYGECLPKTICVKTPNGVNWKLNLVKSDGKIWFQKGWKEFAEYHSLAHGHLLLFKYERTSLFHVHIFDKSALEINYPLTRVEDKRVFNCQGKKPSNNEDCRASQKRKTNSSFEIGSSSCVNVRKFQKAAVHHIDRKGKGKPVIVDADKVTTLERAKSFKTCNPSFVVVMGASYVEHHFLLTIPSMFGKRHFDLNKKRGDIHFQLSNGRVWPAKYRIRMSHTGLRFELSSGWKTFAKDNNLKVGDACNFELILSTNMTFQVHIFRETDKDNTNCSTSQSRINWCLIFFPIPFLI

SEQ ID NO: 709 - protein, 299 aa, Glycine max
MASELELPPGFRFHPTDEELVLHYLCRKCASQPIAVPIIAEIDLYKYDPWDLPGLATYGEKEWYFFSPRDRKYPNGSRPNRAAGTGYWKATGADKPIGQPKPVGIKKALVFYAGKAPKGDKSNWIMHEYRLADVDRSVRKKNTLRLDDWVLCRIYNKKGTIEKLQPSSDVAHSRNIESSEIEDRKPEILKSGGGCLPPPVPVPAPPQATAKTDYMYFDPSDSIPKLHTDSSCSEQVVSPEFASEVQSEPKWNEWEKSLEFPFNYVDATLNNSFMAQFQGNNQMLSPLQDMFMYWPNKSF

SEQ ID NO: 710 - protein, 216 aa, Triticum aestivum
  misc_feature (185)..(185): Xaa can be any naturally occurring amino acid
  misc_feature (201)..(201): Xaa can be any naturally occurring amino acid
MVAAAMQALFDQTDLSLSLSLAPTAAPALNKDDYLAICLAALAATGKGGQQQQDQASAWRPAPAPAQELRFSCAVCGKAFASYQALGGHKSSHRKPPPTGERCVVVAQASAGAGSEASAAASSGGSSGGPHQCTVCGRGFATGQALGGHKRCHYWDGTSVSMSMSVSVSASSSMLRNFDLNLLPXPENVNAGLKRCAEEEXEVQSPLPAKKLRLLL

SEQ ID NO: 711 - protein, 245 aa, Nicotiana tabacum
MGRGRVELKRIENKINRQVTFAKRRNGLLKKAYELSVLCDAEVALIIFSSRGKLSEFCSTSSMMQTLEKYQQCSYASLDPMQSASDHTQNNYHEYLRLKARVELLQRSQRNLLGEDLGTLNSGELEHLEHQLDSSLKQIRSRKTQNMLDQLADLQQKEQMLAEANKQLRRKLEESAARVPLRLSWDNGGQTMQHNRQLPPQTEGFFQPLGLNSSPQFGYSPMGGNEVNAAATANNMNGFIPGWML

SEQ ID NO: 712 - protein, 445 aa, Oryza sativa (japonica cultivar-group)
MDPLGGRRRRTAASESGGGWMKGCTSVRARDTRSRNRKRKRTVVPPAAATFPDLLPEEIVVEILARLPVKSLLRFKSVCRGWRAIISEPSFIRTQLQCSASKQEPSILISPHTLLGRCDIQPPVGGLGDWPNNFSTQISFYQWQRGASIARFMDATAFPANEFHLVCHFAHCDGLVLAPTDTNLYLFNPATRDTITLPDGHGDNHHHGTEMEACYAAGLGLDPVTRKYKVVRAFYRSMDPIRMGMEVFTVGETGAGCGWRETVTDPPYPVSRWLTAFTVNGGYLFWYMDRFRYPNDTLHGGLLWFSLQDQAFRVTLLPHSLDPALDDKVRPDVLHGELCVLHANSDTMPVTIWTTNSPSFDDWERRYCIYVSRLCHPMGLLGDGGMLLWAKHTIHRYDLWSDELTAVCELGGIRYQGGRPPRWKNLFNFSVMPYTESLVRITAAA

SEQ ID NO: 713 - protein, 549 aa, Ipomoea batatas
MAASSGTIDAPTASSSFSFSTASSFMSSFTDLLASDAYSGGSVSRGLGDRIAERTGSGVPKFKSLPPPSLPLSSPAVSPSSYFAFPPGLSPSELLDSPVLLSSSNILPSPTTGTFPAQTFNWKNDSNASQEDVKQEEKGYPDFSFQTNSASMTLNYEDSKRKDELNSLQSLPPVTTSTQMSSQNNGGSYSEYNNQCCPPSQTLREQRRSDDGYNWRKYGQKQVKGSENPRSYYKCTHPNCPTKKKVERALDGQITEIVYKGAHNHPKPQSTRRSSSSTASSASTLAAQSYNAPASDVPDQSYWSNGNGQMDSVATPENSSISVGDDEFEQSSQKRESGGDEFDEDEPDAKRWKVENESEGVSAQGSRTVREPRVVVQTTSDIDILDDGYRWRKYGQKVVKGNPNPRSYYKCTSQGCPVRKHVERASHDIRSVITTYEGKHNHDVPAARGSGSHGLNRGANPNNNAAMAMAIRPSTMSLQSNYPIPIPSTRPMQQGEGQAPYEMLQGSGGFGYSGFGNPMNAYANQIQDNAFSRAKEEPRDDLFLDTLLA

SEQ ID NO: 714 - protein, 222 aa, Brassica napus
  misc_feature (10)..(10): Xaa can be any naturally occurring amino acid
  misc_feature (197)..(197): Xaa can be any naturally occurring amino acid
NPSSESADLXDFKSHNQLEFKETNLTIKNFEPCDLSLSEYTPCEDRQRGRRFDRNMMKYRERHCPSKDELLYCLIPPPPNYKIPFKWPQSRDYAWYDNIPHRELSVEKAVQNWIQVEGDRFRFPGGGTMFPRGADAYIDDIARLIPLTAGGIRTAIDTGCGVASFGAYLLKRDIMAVSFAPRDTHEAQVQFALERGXVPAIIGIMGSKRLPYPARAFDLAHC

SEQ ID NO: 715 - protein, 354 aa, Yarrowia lipolytica
MSDNTTIKKPIRPKPIRTERLPYAGAAEIIRANQKDHYFESVLEQHLVTFLQKWKGVRFIHQYKEELETASKFAYLGLCTLVGSKTLGEEYTNLMYTIRDRTALPGVVRRFGYVLSNTLFPYLFVRYMGKLRAKLMREYPHLVEYDEDEPVPSPETWKERVIKTFVNKFDKFTALEGFTAIHLAIFYVYGSYYQLSKRIWGMRYVFGHRLDKNEPRIGYEMLGLLIFARFATSFVQTGREYLGALLEKSVEKEAGEKEDEKEAVVPKKKSSIPFIEDTEGETEDKIDLEDPRQLKFIPEASRACTLCLSYISAPACTPCGHFFCWDCISEWVREKPECPLCRQGVREQNLLPIR

SEQ ID NO: 716 - protein, 105 aa, Glycine max
  misc_feature (27)..(27): Xaa can be any naturally occurring amino acid
  misc_feature (29)..(29): Xaa can be any naturally occurring amino acid
  misc_feature (41)..(42): Xaa can be any naturally occurring amino acid
  misc_feature (48)..(48): Xaa can be any naturally occurring amino acid
  misc_feature (50)..(50): Xaa can be any naturally occurring amino acid
  misc_feature (56)..(56): Xaa can be any naturally occurring amino acid
  misc_feature (66)..(66): Xaa can be any naturally occurring amino acid
  misc_feature (71)..(71): Xaa can be any naturally occurring amino acid
  misc_feature (82)..(82): Xaa can be any naturally occurring amino acid
  misc_feature (91)..(91): Xaa can be any naturally occurring amino acid
FSPYFRSPRFVPLAAETLAAAAAAADXRXQAQMGGKCPHRXXKKRRLXCXQVRRGXFLVKADDAVXDELVXLADQGKDSEGXALPVDEDLXGMGQFYCLHCDRYF

SEQ ID NO: 717 - protein, 602 aa, Oryza sativa (indica cultivar-group)
MDTLFRLVSLQAASEQQQQQQQSASYNSRSTTSSGSRSSSHQTNASYSYYHHSSNSGGGGGGGGGYYYGGQQPPPSQYYYLEPYQEECGNAPHHQLYMDEDFSSSSSSRHFHHGAPVQQQQPPASSTPTGTAPTPPLSTSSTAAGAGHGLFEAADLSFPPDLNLDFSSPASSSGGGTASSGAVGGGGGGRWASQLLLECARSVAARDSQRVQQLMWMLNELASPYGDVEQKLASYFLQGLFARLTASGQRTLRTLAAASDRNTSFDSTRRTALRFQELSPWSSFGHVAANGAILESFLEVAAAASSETQRFHILDLSNTFCTQWPTLLEALATRSADETPHLSITTVVSAAPSAPTAAVQRVMREIGQRMEKFARLMGVPFRFRAVHHSGDLAELDLDALDLREGGATTALAVNCVNSLRGVVPGRARRRDAFAASLRRLDPRVVTVVEEEADLVASDPDASSATEEGGDTEAAFLKVFGEGLRFFSAYMDSLEESFPKTSNERLALERGAGRAIVDLVSCPASESMERRETAASWARRMRSAGFSPVAFSEDVADDVRSLLRRYREGWSMREAGTDDSAAGAGVFLAWKEQPLVWASAWRP

SEQ ID NO: 718 - protein, 227 aa, Arabidopsis thaliana
MALEALTSPRLASPIPPLFEDSSVFHGVEHWTKGKRSKRSRSDFHHQNLTEEEYLAFCLMLLARDNRQPPPPPAVEKLSYKCSVCDKTFSSYQALGGHKASHRKNLSQTLSGGGDDHSTSSATTTSAVTTGSGKSHVCTICNKSFPSGQALGGHKRCHYEGNNNINTSSVSNSEGAGSTSHVSSSHRGFDLNIPPIPEFSMVNGDDEVMSPMPAKKPRFDFPVKLQL

SEQ ID NO: 719 - protein, 169 aa, Brassica napus
  misc_feature (154)..(154): Xaa can be any naturally occurring amino acid
MSCNNGMSFFPSNFMIQTSYEDDHPHQAPSLAPLLPSCSIPQDLHGFASFLGKRSPVEGLEAGNIMNGEEDYSDDGSQMGEKKRRLNMEQVKTLEKNFELGNKLDPERKMQLARALCLQPRQIAIWFQNRRARWKTKQLEKDYDTLKRQFDSPXAENDLLQTHNQKLQA

SEQ ID NO: 720 - protein, 257 aa, Citrus unshiu
MCSSSKLPATMEFPKQNPESSSQSKKIGRGKIEIKRIENTTNRQVTFCKRRNGLLKKAYELSVLCDAEVALIVFSSRGRLYEYANNSVRATIDRYKKACADSSNPGSITEANTQFYQQEATKLRRQIREIQNLNRHILGEALSTLNFKELKNLEARLEKGIGRVRSKKNEMLLAEIEFMEKREIQLQNDNMYLRARISENERAQQERQSESMMQQGGGHVYEPAASQPYDRNFLPVNLLEPNHQYARQDDQPPLQLV

SEQ ID NO: 721 - protein, 338 aa, Brassica rapa subsp. pekinensis
MGRSPSSDDSGLKKGPWTPEEDEKLVNYVQKHGHSSWRALPKLAGLNRCGKSCRLRWTNYLRPDIKRGKFSPDEEQTILNLHAVLGNKWSTIANHLPGRTDNEIKNFWNTHLKKKLIQMGIDPMTHLPRTDIFSSLSQLMSLSSNLRGFVDMQQQFPNGQDQTILKLQTEMAKLQLFQYLLQPPTMSNNIRNPNDFDILSLLNSIASFKEITSNNLDLGSNLQDFNSLPSLKTLNSNIGPSSVLPQIPEDNHFKFCRIERENLPVSPIWLSDPTNSNQHMLPSLDPSSAVSDDMIRNQYVIEHVNSNLTSSSQESGASASAAWPDHLLDDSIFSDMIP

SEQ ID NO: 722 - protein, 211 aa, Citrus unshiu
MGRGKMEMKRIENATNRQVTFSKRRNGLFKKARELTILCDAKVSILICSSTAKAHEYISPSTTTKQLLDLYQKTLRVDLWSSHYEKMLENLGAVEQVNRILKKQIRQRMGESLNDLTLEELTGLEQDILDGLKIIRECKDQVLARQINTFKRKVRGVQKENKSLQDGFIINAKEEDPHYEYELVDNGEHCDSDFGFQNEGPGIFALRLQPN

SEQ ID NO: 723 - protein, 299 aa, Solanum lycopersicum
MIIMSTEQPNCSESTESSCNSSSSSSPSSPSSVLLQPLPQINSKNRLKRCRGEEEVEEEEDVVVNNPNPKKMNKNNNNGSSTSVVSYVGVRMRAWGKWVSEIREPKKKSRIWLGTFATPEMAARAHDVAAMSIKGTSAILNFPQFSHLLPRPVTCSPRDIQNAAVKAAHMDHLNPKFSILPETSAATMTSSSSSLSLVSGVTSSSSSFQDDEESRPSPPELIPEATGQLSEIVELPKLGSSYELVESTQSLFESDEWWDNNYGNCEYFFGQDNYISSNMEFTGLENVVSTSFESFLWQH

SEQ ID NO: 724 - protein, 268 aa, Zea mays
MAPQSLDLGLSLGLGVAAFQPSFCHPAGNAAAERETSPTAADERERRCSPAGSPTSSGSGSGKRVATERSAGSGSGDEDDDGGARKKLRLSKDQAAVLEECFKTHHTLTPKQKAALASRLGLRARQVEVWFQNRRARTKLKQTEVDCEYLRRWCEQLAEENRRLGKEVAELRALSAAPAPAAPLTALTMCLSCRRVSSSSCSSSPPNTHAHAHAAAAGTGTGGSVASPAAATLPAHRQFLCGFRDGGAAAAAVYGTSSALAKALRAAR

SEQ ID NO: 725 - protein, 240 aa, Solanum lycopersicum
MDSSSSSSQFFYSMNSDLNSSDSSYEWSNFNTQSYLPFNVNDSEEMLLFGVLNAAHEETTSETVTSHRVKEEEVTSESEVIEAIPAKEKSYRGVRRRPWGKFAAEIRDSTRNGVRVWLGTFDSAEDAALAYDQAAFSMRGNSAILNFPVETVRDSLRDMKCHVDDDCSPVVALKKRHSMRKRSTNSKKVNSISKVVREVKMENVNNVVVFEDLGADYLEQLLSSSSSDQSSCDATYFSPW

SEQ ID NO: 726 - protein, 140 aa, Oryza sativa (japonica cultivar-group)
AGGHAAQSPSPSCGLGEKKRRLALEQVRALERSFDTDNKLDPDRKARIARDLGLQPRQVAVWFQNRRARWKTKQLERDFAALRARHDALRADCDALRRDKDALAAEIRELREKLPTKPADTAASVKVEAGNDAAAGAAAA

SEQ ID NO: 727 - protein, 132 aa, Oryza sativa (japonica cultivar-group)
MERQGLDLGLSLGLGLTTAATWPAAGFCLNSGMAEQEVIRRDDVVAATAAEDERFACSPGSPVSSGSGKRGSGSGSGDEVDDAGCDVGGGGARKKLRLSKDQAAVLEECFKTHHTLTPKQKVALAKSLNLRP

SEQ ID NO: 728 - protein, 203 aa, Akebia quinata
VGIIKKARELSVLCDAQVSLIMFSATEKLSEYISPTVTTKKVFDRYQQTAGINLWSTHYERMQENLNKQKEINRRLRKEIRQRMGEDLNELSIDVLRGLEQNMEHSLNIVRERKLKVIRTQSGTYRKKVTNLEQVHKKLMRELEGRNEDPHYVFANHNGDGDYQSALELANNGGSHIFALRLQPSQPILREGGGYGSHDLRLA

SEQ ID NO: 729 - protein, 238 aa, Triticum aestivum
APKQKWTSEEEDALRAGVRKHGAGKWRTIQKDPEFSPVLSSRSNIDLKDKWRNLSFSASGLGSSKVRVPRITGPTSSPSPSAQALLLPAPNKVTEATLPADAEKKPQDGKTPPKYGVMIMEALSELNEPNGSDMAAILRFIEERHVVQPTFRRFLTSKLRRLADSNKIVKIDKSYRLPDSFATRTPAPKQKDPSKPSKVSKTIGLFTASSPALEAAMAAAVKVADAEAKAHDAHDQMM

SEQ ID NO: 730 - protein, 224 aa, Oryza sativa (indica cultivar-group)
LSLFCLVGCCVAGGEQKKARQRRRRKVKPEAAAALAGESGGDEQAKKRRLSDEQARFLEMSFKKERKLETPRKVQLAAELGLDAKQVAVWFQNRRARHKSKLMEEEFAKLRSAHDAVVLQNCHLETELLKLKERLADVEEEKAKLAAVAAATTGGGGGGGGGSSSPTSSSFSTVTYHPVLAGQFGVEAAAEEADLTYMSEYAYNSYMLELAAAGYCGGVYDQFS

SEQ ID NO: 731 - protein, 389 aa, Triticum aestivum
  misc_feature (286)..(288): Xaa can be any naturally occurring amino acid
VFHRTSLYKKACRYRSGIPGISSTHASAIEHPEQQQAMAMAAVASSTMEVDQDLPGFRFHPTEEELLGFYLSRVALGKKLHFDIIGTLNIYRHDPWDLPGMAKIGEREWYFFVPRDRKAGSGGRPNRTTERGFWKATGSDRAIRSTGDPKRVIGLKKTLVFYQGRAPRGTKTDWVMNEYRLPDTGAPPPQEDTVLCKVYRKATPLKELEQRAFQMEEMKQRSGGNGGYGYSGATKTVPRSRQPATSTCRSPTTSRATFLIPSSSSSSAAAVALSGNSSSHDAPRVXXXGADVATATVASTSSLSQAANAPFHLQLSAVTPPCGLQLPAGTMGCRTCPATATGGKQGVVDCPAGVPAGSSTIVDWLITVLTHWPPVEDKLMFLTPLVYNQ

SEQ ID NO: 732 - protein, 598 aa, Arabidopsis thaliana
MAIQTQLPCDGDGVCMRCQVNPPSEETLTCGTCVTPWHVSCLLPESLASSTGDWECPDCSGVVVPSAAPGTGISGPESSGSVLVTAIRAIQADVTLTEAEKAKKRQRLMSGGGDDGVDDEEKKKLEIFCSICIQLPERPVTTPCGHNFCLKCFEKWAVGQGKLTCMICRSKIPRHVAKNPRINLALVSAIRLANVTKCSGEATAAKVHHIIRNQDRPDKAFTTERAVKTGKANAASGVLVGESWEDRQECRQWGVHFPHVAGIAGQAAVGAQSVALSGGYDDDEDHGEWFLYTGSGGRDLSGNKRVNKIQSSDQAFKNMNEALRLSCKMGYPVRVVRSWKEKRSAYAPAEGVRYDGVYRIEKCWSNVGVQGLHKMCRYLFVRCDNEPAPWTSDEHGDRPRPLPDVPELENATDLFVRKESPSWGFDEAEGRWKWMKSPPVSRMALDTEERKKNKRAKKGNNAMKARLLKEFSCQICRKVLSLPVTTPCAHNFCKACLEAKFAGITQLRDRSNGVRKLRAKKNIMTCPCCTTDLSEFLQNPQVNREMMEIIENFKKSEEEAEVAESSNISEEEGEEESEPPTKKIKMDKNSVGGTSLSA

SEQ ID NO: 733 - protein, 307 aa, Capsicum annuum
MIKGIVGNQQLGLPAGFRFHPTDEELVQHYLCRKCAGQSISVSIIAEIDLYKFDPWQLPEKALYGEKEWYFFSQEDRKYPNGSRPNRAAGTGYWKATGADKPVGKPKTLGIKKALVFYAGKAPRGIKTNWIMHEYRLANVDRSAGKSNNLRLDDWVLCRIYNKKGHTLRSITMWASKRGESFGEFEDEIKPKIFPTQLAPAPGQWPPRPQSTPASDYFNFETSESMTTTRMHTTNSSSGSEHVLSSCDKEVQSAPKWDDLGTAALDFQINYLDGLLNDPFEIQMQQQNCNIDQFNTFQDMFLYMQKP

SEQ ID NO: 734 - protein, 176 aa, Triticum aestivum
VDHLEQQRAMAMAVASSTMEVDQDLPGFRFHPTEEELLGFYLSRVALGKKLHFDIIGTLNIYRHDPWDLPGMAKIGEREWYFFVPRDRKAGSGGRPNRTTERGFWKATGSDRAIRSTGDHKRVIGLKKTLVFYQGRAPRGTKTDWVMNEYRLPDSGAAPPQEDTVLCKVYRKATPL

SEQ ID NO: 735 - protein, 302 aa, Oryza sativa (indica cultivar-group)
MGRHACSAAGVQQKLRKGLWSPEEDEKLYNHIYRYGVGCWSSVPKLAGRLQRCGKSCRLRWINYLRPDLKRGSFSQQEEDAIVGLHEILGNRWSQIASHLPGRTDNEIKNFWNSCLKKKLRQRGIDPSTHQPISTAAAAAAAALDTSTQDQKPPATADGFALKQQQQVFDPFPVIDSFGSGFDATGMPLYGHLGGKDAAGFVDYSSVLDVSENLGYGESSSNSSNWNCGVGAPEVNNALESEPLHWATESKVEPFVGYGEGDAMEHKFGLPCHGQQEQGMTHFDFDVSRSMVVGDFNFEYFR

SEQ ID NO: 736 - protein, 232 aa, Oryza sativa
  misc_feature (85)..(85): Xaa can be any naturally occurring amino acid
  misc_feature (104)..(104): Xaa can be any naturally occurring amino acid
  misc_feature (167)..(167): Xaa can be any naturally occurring amino acid
MMGATSPSGLELTMAVPGLSSSGSEGAGCNNNNAGGGCNMRDLDINQPASGGEEEEFPMGSVEEDEEERGVGGPHRPKKLRLSKXSSPALLEESFRLNHTLTPXKQKEALAIKLKLRPRQVEVWFQNRRARTKLKQTEMECEYLKRCFGSLTEENRRLQREVEELRXAMRVAPPTVLSPHTRQPLPASALTMCPRCERITAATGPPAVRPPPSSAAAAAPSPFHPRRPSAAF

SEQ ID NO: 737 - protein, 302 aa, Glycine max
MGTQRQNSMYSLTLDEVQNQLGDLGKPLTSMNLDELLKNVWTAEASQTIGMDNEGTSQASQAALQHQASLSLTGALSKMTVDEVWRDIQENKIIAEKKFEDRHPTLGEMTLEDFLVKAGVVADASSNRTNTGTIAGVDSNVAVPQFPSQGQWIQYPQVQYQHSPQSLMGGIYMPSQGMVQPLHMGAEASIDVSFADSQVALPSPLMGTMPDMLTPGRKWSNSEDMREKTVERRQKRMIKNRESAARSRARKQAYTNELENKVSRLEEENERLRKQKELELMLPCEPPPEPKYQLRRIASAPF

SEQ ID NO: 738 - protein, 263 aa, Festuca arundinacea
MSRKKKVRRRSTGPDSVSEIIKKWKEQNQKLQEENGARKAPAKGSKKGCMAGKGGPENSNCKYRGVRQRTWGKWVAEIREPNRGNRLWLGSFPTAVEAAHAYDEAARAMYGATARVNFSERSLDANSGCTSAPPVLMSNGPTAVSHPADGKDESESPSLRSDGPTATLRRSDAKDEPESAGTVVHEVKTEVSNDSTSVREERKTVEVFQPKGKALHKEEKVSYDYFNVEEVLDMIIVELSADRKMEVHEEYQDGDDGFSLFSY

SEQ ID NO: 739 - protein, 309 aa, Brachypodium sylvaticum
MMARGGGGSLDLGLGLGLGLASQGSLTSSTTTASSSPGSHQQGQHWHAALSSVVAADAGAAARSEFPSSYQQQRYNQQRHQEGRTSTSPESGAALSGVSGGGGGIKRALERTGSGVSRGAAISDEDEDGDGAGAGGRKKLRLSKDQAAVLEECFKTHSTLNPKQKTALANRLGLRPRQVEVWFQNRRARTKLKQTEVDCEYMKRWCEQLADQNKRLEKEVAELRALKAASAPAAQQQSAATLTMCPSCRRVATTQQQQCHPKPNAQAAAGNVVPSHCQFFPSTAAAGDRSTRQATWNSAPPPLVTRELF

SEQ ID NO: 740 - protein, 227 aa, Brassica napus
  misc_feature (209)..(209): Xaa can be any naturally occurring amino acid
MENNDGAMTNGVIINKGPLNAVKKPPTKDRHSKVDGRGRRIRMPIICAARVFQLTRELGHKSDGQTIEWLLRQAEPSIIAATGTGTTPASFSTASLSASSSPFALGKRVLRAEEEGESGGPGGGGELTVGHAMSSGGFWAVPARHTLGQVWSFAAGATPEMLFTQQQQAATLFVRQQQHASAAVAAMGEASAARVGNYLPGHHLNSAGXSLSGGSPGSGRREEDDSR

SEQ ID NO: 741 - protein, 261 aa, Triticum aestivum
MSSSAMEALHALIPEQHQLDVEAAAAVSSATSGEESGHVLQGWAKRKRSRRQRSEEENLALCLLMLSRGGKQRVQAPQPESFAAPVPAEFKCSVCGKSFSSYQALGGHKTSHRVKQPSPPSDAAAAPLVALPAVAAILPSAEPATSSTAASSDGATNRVHRCSICQKEFPTGQALGGHKRKHYDGGVGAAASSTELLAAAAAESEVGSTGNGSSAARAFDLNIPAVPEFVWRPCAKGKMMWEDDEEVQSPLAFKKPRLLTA

SEQ ID NO: 742 - protein, 404 aa, Selaginella kraussiana
MKDKQRWQPEEDALLCAYVKQYGPNDWNLVSERMATPLDRDPKSCHERWKNYLKPGLKRGPLSEEEQNLVIRLQEKYGNKWKRIAAEVPGRTAKRLGKWWEVHKERRQKEAIQRHQRIQTGVHTSHLSMFYGQTVAPFIPPAQSFSTCAEVVSSSSASEGESQCRNEPRMNLPAAFPPTSSEPVLTLGPTVLDLLPAWKPAPRAASTSELPSLMAPEAIMKPNLSLSLDSGAESGDTDTGTHFNNNKKVSTIIPKDDEFCNEINSDISPGELIPLLGLVKELEENKESWNVQKKNAASTLRELKQQLECERIEKRKQKMLEVESKIQALRKEEKLYLDKLELDYAELVAKLDRDAELKEEKLVESWSLKYNKLVLMFEQTMQRYSSFHGPIFQAIQMRGMNSPA

SEQ ID NO: 743 - protein, 391 aa, Selaginella viticulosa
  misc_feature (18)..(18): Xaa can be any naturally occurring amino acid
MSSFLKDRQRWQPEEDAXLCAYVTEYGPQNWQLISERTGKRLDRDPKSCEERWKNYLKPGIKRGPLTDEEQQLVIKLQTKYGNKWKRIAAQVPGRTAKRLGKWWEVYKERKLKENKKLLGIAATGNGDSIITAEEEMHLPVVAPIFSRPFLSSTPDLLHGNGDPALSTSGNDHHFGNNTSGASNAETLSENEPLLTLGPSSLVQNAAKQCSPEMVATSGVTMPKWIPKELELQIASTLNESAVESSLSLSSSFDDGVDCLDPASVSSDNRESSAIQVFELFKQLKDQRNNWILERKKVWSKFRELKRQLDSERLEKQRQKIEEVGIKVRALKDEEARFLRKVEQDYEELVSNLERDAELKENKIMEVWTIKHEKLVHAYERYTISGPHRYA

SEQ ID NO: 744 - protein, 151 aa, Oryza sativa (indica cultivar-group)
MGDVKGVGVDTLELVKPSQRAYECSVCGKVYWCYQALGGHMTCHRNLFAQVVAGDELSSDGTMVVKGHKCSICRLEFPSGQALGGHMRVHYVCGVEGGSVKEKNVVKTKVTGALKLVLKDFDLNVLVVATMVGDEAESSHSEAKARMMTLP

SEQ ID NO: 745 - protein, 273 aa, Zea mays
  misc_feature (223)..(223): Xaa can be any naturally occurring amino acid
  misc_feature (232)..(232): Xaa can be any naturally occurring amino acid
MTNLSAMAASQSYVIRFDGHFDEPSPSSAGAEPPGPQPPFAGRMISLEREHQVIVAALLHVVSGYATPPPQVFTPPPAAARCQVCGMERCLGCEFFAAGEGALGGGAEKAAATGGAAALAAGQRRRRKKKNKYRGVRQRPWGKWAAEIRDPRRAVRKWLGTFDTAEEAARAYDQAAIEFRGPRAKLNFPFPEQPPTGHDEPISSNGDASAAARSSDTTPSPSXCSADAEERXQPEWPSAGQEAGDQLLWEGLQDLMRLDEGEPWLHPASSAWN

SEQ ID NO: 746 - protein, 358 aa, Oryza sativa (indica cultivar-group)
MALIATGATATATAAPVASPAASSTASELMAQGRESAAVLEALLHGASLPPAHGGAHALAAEILRCCDRALAASRAGGDAESSSADTKRKPATAQPSTRRRRRYIYMYVSSRSCDGARDRAATQQEIFCRATASGGGAAAAAEPARVEKARTSEDGFLWRKYGQKEIKNSKHPRLYYRCSYKDDHGCTATKQVQQSEEDPSLYVITYFGDHTCSCQTAAAAAMDDDDDDENSQHFVINFGPATASRSGSPPLLYDDGDDGDVWRETAATPPSSRQSRCSPEGDGEESGVKMSKEEPVDSCPAPSAVSSPADVVSCSSPAMEPDLLGCLNWDDDFGDSSFVDADEFMNFDEIDLFQIYS

SEQ ID NO: 747 - protein, 529 aa, Arabidopsis thaliana
MKIEIQCMENKQPLAASCSSASEGSGCFFLKSPEIATPATVSSFPRRTSGPMRRAKGGWTPEEDETLRRAVEKYKGKRWKKIAEFFPERTEVQCLHRWQKVLNPELVKGPWTQEEDDKIVELVKKYGPAKWSVIAKSLPGRIGKQCRERWHNHLNPGIRKDAWTVEEESALMNSHRMYGNKWAEIAKVLPGRTDNAIKNHWNSSLKKKLEFYLATGNLPPPASKFIVLKDIADGDRDSKQSSATKPFKDSDSLTQTSSGNTDSNEVGRDHFDSSSALLEEVAASRRIGVNEYACSPVEYKPQLPNLEPISEEVRINSKAYFERSIQRKVENGFGTPKHGNLYYKSPLDYYFPSEADLQHMYGYECGCSPGAASPVSLMTTPCNKDSGLTATRSPESFLREAARTFPNTPSIFRKRRKVVLAAKTDAVVVVNGVVKEVDRKEESKDMRKSLLLETTDNCSDDEELGLNGNAFNLSPPYRLRAKRTAVIKSRQLEFTSEKEKQPDNEIEFTSAKEKQPDNEIKTSEEDKPV

SEQ ID NO: 748 - protein, 238 aa, Oryza sativa (japonica cultivar-group)
MAVEEVLDGAAPMLSSSPAASGEEVGARKPQQRCGGAEGWSKRKRSRRRHRDRAAAPPPHGSEEEHLALSLLMLARGHRDPSPAPQEQHGCSVCGRVFSSYQALGGHKTSHRPRTPPTMAAVVVVDEPAATTASPAASSSNSGSGSGGGGGNKVHECSVCKKTFPTGQALGGHKRCHYEGPIGSGGGAAVAGRGFDLNLPAVALPDIMTERCLPAAAEEEEVLSPLASFKKPRLMIPA

SEQ ID NO: 749 - protein, 131 aa, Brassica napus
  misc_feature (10)..(11): Xaa can be any naturally occurring amino acid
  misc_feature (15)..(16): Xaa can be any naturally occurring amino acid
  misc_feature (19)..(20): Xaa can be any naturally occurring amino acid
  misc_feature (25)..(25): Xaa can be any naturally occurring amino acid
  misc_feature (27)..(28): Xaa can be any naturally occurring amino acid
  misc_feature (35)..(35): Xaa can be any naturally occurring amino acid
  misc_feature (43)..(43): Xaa can be any naturally occurring amino acid
  misc_feature (53)..(53): Xaa can be any naturally occurring amino acid
  misc_feature (82)..(82): Xaa can be any naturally occurring amino acid
  misc_feature (87)..(87): Xaa can be any naturally occurring amino acid
  misc_feature (95)..(95): Xaa can be any naturally occurring amino acid
  misc_feature (104)..(105): Xaa can be any naturally occurring amino acid
  misc_feature (107)..(114): Xaa can be any naturally occurring amino acid
  misc_feature (116)..(120): Xaa can be any naturally occurring amino acid
  misc_feature (122)..(124): Xaa can be any naturally occurring amino acid
  misc_feature (126)..(129): Xaa can be any naturally occurring amino acid
ISIWTKDCRXXSCQXXVMXXLLHGXHXXANQLKAXSWTTTPKXDSSVEREDLXAKSVLHCFSDALSILIDTNDHNKDDDKSXNSSPXDSSHVLEXSRKPFHKRXXKXXXXXXXXYXXXXXPXXXYXXXXPP

SEQ ID NO: 750 - protein, 366 aa, Oryza sativa (indica cultivar-group)
MVTSKEFARDQAAMDQKIKSDVGEVVLAGDEEEDGDVVLPGFRFHPTDEELVTFYLRRKVARKSLSIEIIKEMDIYKHDPWDLPNASTVGGEKEWYFFCLRGRKYRNSIRPNRVTGSGFWKATGIDRPIYSAAVNSNSGESIGLKKSLVYYRGSAGKGTKTDWMMHEFRLPPAIAAADASPCMQEAEVWTICRIFKRSITYRKQQQQQAWRPPAPAPATVTVKAPPPGDSSSNTGSFESDGGGDEFMNCGLTPAISQQQQHGGRHQMMSTMSCNGGYFFNDGIHHSHSHHKLHSQWGSLQMAPPEPKPEPEQKPLSSPAMTIAFHQNDHGFPAAAADFYKDGYLEEIARMMEVADPSPTGFYDCRY

SEQ ID NO: 751 - protein, 207 aa, Brassica napus
  misc_feature (40)..(40): Xaa can be any naturally occurring amino acid
MAAFEESSDLDAIQEHLLEDFLVADGFMGDFDFNASFVSXGLWCIEPVMNQVPKQEPDSPVLDPDSFVREFLQVEAESSSEQNSSPHETDQSVSPRKEAKRLEEEEEPRHYRGVRRRPWGKFAAEIRDPAKKGSRIWLGTFESNVDAARAYDCAAFKLRGRKAVLNFPLDAGKYEAPVNLGRKRKRSDVQEELQRSQSNSSSSSSDL

SEQ ID NO: 752 - protein, 339 aa, Arabidopsis thaliana
MSSAIVVSQDAESLGLQIYSRKEKSLGVLVSNFLRLYNRDDVDLIGLDDAAGQLGVERRRIYDVVNILESIGIVARRGKNQYSWKGFGEIPRSLDELKEEGMRERLGYSSSNNSDKVSNGCEREEPLTLTPDDQENSSSSKMDQKKEKSLWLLAQNFVKMFLCSDDDLITLDSAAKALLSDSPDSVHMRTKVRRLYDIANVFASMNLIEKTHIPVTRKPAYRWLGSKSIAERGLSLFNSGEPKRVFGTEITNLRAKRNKTYCSSIRKQIGYKKHDEENTEQESKPAASKYVFGPFSPIGASKTNNDKVGKGRLLEIEALASTYQPQYCNQGNNHTLIVS

SEQ ID NO: 753 - protein, 198 aa, Trillium camschatcense
QVTFSKRRNGLLKKAFELSVLCDAEVGVIVFSPRDKLYEFSSTSMQSTIDRYRMHTKCVNTNMPTEHNTQQWKYEAVSMANKIELLEASKRKLMGESLEPCTVDELQELESQIERSLSNIRGRKDYLLEQQIEELKEKERRLLEDNELLRHKSEEETELQLATPKGVQYDHGSQQMELETELHIGWPPKVATQCISHA

SEQ ID NO: 754 - protein, 386 aa, Oryza sativa
TLQGLQRCGKSCRLRWINYLRPDLKRGAFSQEEEDLIIELHAVLGNRWSQIAAQLPGRTDNEIKNLWNSCIKKKLRQKGIDPNTHKPLTEADRRGAAPTVSTERTSGSSDVNPSSAGALGNLSHLLSETAQSSMLLPVYDKNHPETASLPRPKVPPKELFLDQLTAGHESPSSCRSSGPTLYFPFQQPLGYSNECGTGDGASMNSLWFNQNDFNCSTISTVMPPVSPSALSTSMGLNLPPENPRHGGTGIGNTPFYWDGSNPSSSGSTGSSGSNSMGFEPQSTTSILENSVFPWTDIGQEKDTRVHLVEELKWPDLLHGTFAEATTAMQNQSQSLYDDVIKAESQFNMEGICASWFQNQQPQQQLQAASDMYDKDLQRLPLSFEHI

SEQ ID NO: 755 - protein, 403 aa, Arabidopsis thaliana
MSDLSPERFKLAVTSPSSIPESSSALQLHHSYSRKQKSLGLLCTNFLALYNREGIEMVGLDDAASKLGVERRRIYDIVNVLESVGVLTRRAKNQYTWKGFSAIPGALKELQEEGVKDTFHRFYVNENVKGSDDEDDDEESSQPHSSSQTDSSKPGSLPQSSDPSKIDNRREKSLGLLTQNFIKLFICSEAIRIISLDDAAKLLLGDAHNTSIMRTKVRRLYDIANVLSSMNLIEKTHTLDSRKPAFKWLGYNGEPTFTLSSDLLQLESRKRAFGTDITNVNVKRSKSSSSSQENATERRLKMKKHSTPESSYNKSFDVHESRHGSRGGYHFGPFAPGTGTYPTAGLEDNSRRAFDVENLDSDYRPSYQNQVLKDLFSHYMDAWKTWFSEVTQENPLPNTSQHR

SEQ ID NO: 756 - protein, 179 aa, Oryza sativa (indica cultivar-group)
MARGKVQMRRIENPVHRQVTFCKRRMGLLKKAKELSVLNMEGLIERYKCNLPEAQVESTEQNIPMVIQQDVLFLRREVDLLQNSLRYMYGEKDINHMNLGELQSLESNLEVWVNNIRSTKMQLMSREIEMLKNKEGILKAANDILQERIIEQTSILDVRGNMMIPQVPFQLTTESNYYF

SEQ ID NO: 757 - protein, 272 aa, Zea mays
MQMDSYNYNYASFFHDEAPSFYPHVAVPPSPELPIGLIASPGEPEPPFAPPMPASFQDYTGAVGVGVGVRAPFGGASVHGQAIDALGGGDGQREQSMAMAEDGEEPAPRRRQPAGGPAAAAVESSRGFRHMMRERQRREKLSQSYADLHALVAARSRGDKNSIVQAAAVYIHELRGARDQLQRRNEELKARILGHDAGQQCVKVQFEVDEPASAIDSMIGALRRLKGMDVRARGIRSSLSGRRLWTEMNVETTVSSTLAILVESSLCFADND

SEQ ID NO: 758 - protein, 262 aa, Oryza sativa (indica cultivar-group)
MAGLPKLFPVPPKATIKTPPLLRQIQAVISLKSSGRSKGLAATATASEASSNYDSVGDMARGKVQMRRIENPVHRQVTFCKRRMGLLKKAKELSVLCDADIGVIVFSPHGKIYELATNGNMQGLIERYKNKSNLPEAQAESNEQNIPQVIQQDVLLLRQEVDLLQNSLRYMYGERDISHMNLGELQSLESNLEVWVNNIRSTKMQIMSREIEMLKNKEGILKAANDILQERIIAQTSIMDVGCNMMIPQVPFQLTTESNYYF

SEQ ID NO: 759 - protein, 195 aa, Thellungiella halophila
MTKMGFKPDSNPSPNPNESNAKEIRYRGVRKRPWGRYAAEIRDPGKKTRVWLGTFDTAQQAARAYDAAAREFRGAKAKTNFPTFLELNAAKDGGFARSPSQSSTVDSVSPTSARLVTPPQLELSLGGGGGGACYQIPVARRPVYFYNMTTFPAAAAATCGVQSESDSSSVVDFECGAEKKYRPLDLDLNLAPPAE

SEQ ID NO: 760 - protein, 163 aa, Brassica napus
  misc_feature (157)..(157): Xaa can be any naturally occurring amino acid
MEDKSGISPSGVITVKGDEALASRTEFQQSPSFLQFVSPTTVVTPPPPPASTTVNPGPAAVPPPLSSAGSDLTKKKRGRPRKYAPDGSLNPRASRPTLSPTPISSSIPFSGDYNHHSHWKRGKAQQKQQHVDIIKKSHNFHEYGSSPAPPPPPPPGXLSCYVG

SEQ ID NO: 761 - protein, 312 aa, Arabidopsis thaliana
MKRSRGSSDSLSGFLPIRHSTTDKQISPRPTTTGFLYSGAGDYSQMFDALEDDGSLEDLGGVGHASSTAAEKKRRLGVEQVKALEKNFEIDNKLEPERKVKLAQELGLQPRQVAIWFQNRRARWKTKQLERDYGVLKSNFDALKRNRDSLQRDNDSLLGQIKELKAKLNVEGVKGIEENGALKAVEANQSVMANNEVLELSHRSPSPPPHIPTDAPTSELAFEMFSIFPRTENFRDDPADSSDSSAVLNEEYSPNTVEAAGAVAATTVEMSTMGCFSQFVKMEEHEDLFSGEEACKLFADNEQWYCSDQWNS

SEQ ID NO: 762 - protein, 245 aa, Solanum lycopersicum
MDSSSSSSQFFYSMNSDLNSSDSSYEWSNFNTQSYLPFNVNDSEEMLLFGVLNAAHEETTSETVTSHRVKEEEVTSESEVIEAIPAKEKSYRGVRRRPWGKFAAEIRDSTRNGVRVWLGTFDSAEDAALAYDQAAFSMRGNSAILNFPVETVRDSLRDMKCHVDDDCSPVVALKKRHSMRKRSTNSKKVNSISKVVREVKMENVNNVVVFEDLGADYLEQLLSTSCQVIKVVVMQLISVHGKIKD

SEQ ID NO: 763 - protein, 183 aa, Lupinus paraguariensis
SGPYPSSSSSYHPFAFFNPENASSNNTFSHDLLSFPYNTPTTHHYHAPIPETLSNFADCAASAAMFKNDVSGSNFGFSNFLAKKPASKKDRHSKIHTSQGLRDRRVRLSIEIARKFFDLQDMLGFDKASNTLEWLFNKSKKAMKELARSKNSSSGVVANSFSSSDSECEVVSMINQDSIDATP

SEQ ID NO: 764 - protein, 319 aa, Arabidopsis thaliana
MSTDISPPYSQTHVEPVNGYPSDNKRCDDSSVPAKYDDLVRNSALFWEKLRAFLGLTSKTLKVPTVGGNTLDLHRLFIEVTSRGGIERVVKDRKWKEVIGAFSFPTTITSASFVLRKYYLKFLFQLEHVYYLEKPVSSLQSTDEALKSLANESPNPEEGIDEPQVGYEVQGFIDGKFDSGYLVTMKLGSQELKGVLYHIPQTPSQSQQTMETPSAIVQSSQRRHRKKSKLAVVDTQKPKCHRSGYNFFFAEQYARLKPEYHGQERSITKKIGHMWSNLTESEKQVYQDKGVKDVERYRIEMLEYKSSHESGATASTVAQ

SEQ ID NO: 765 - protein, 183 aa, Lupinus paraguariensis
SGPYPSFSSSYHPFAFFNPENASSNNTFSHDLLSFPYNTPTTHHYHAPIPETLSNFADCAASAAMFKNDVSGSNFGFSNFLAKKPASKKDRHSKIHTSQGLRDRRVRLSIEIARKFFDLQDMLGFDKASNTLEWLFNKSKKAMKELARSKNSSSGVVANSFSSSDSECEVVSMINQDSIDATP

SEQ ID NO: 766 - protein, 819 aa, Pisum sativum
MAACALFNGVGGGNTTPDETNNNSTSNSSNISTEDFHNMPQQQPHHSERKLLRKRMASEMELQLHNNNNNNDYHRFSRRTNNTSSLNCSLPATTQKGVTTTTTTTLASSGNNNNNNNNNNNYHYHNNNNNSIINNNNNNVALSRDNVAIQNFPTVTVTTNYSTMLLPSSCSSNLNNSSTSAANYTHYQQPLVEEQNTLPEICGFSGLPLFPSQNNQTNRTNNNSSNNRNNTNTVVDVVSSSPSMEETSATTNWIDGILKDLIHTSNSVSIPQLINNVREIIYPCNPNLALVLEHRLRLLTEPNTCVPERKRNSTEQSGVNVNGNVLAASNVNNSSVKLMNRVDDVVPTSLHFSDSSTLLNQNQNQNMFPNWGATQINNNNNPSVSLVTLPSQPLSTQQDQQHQLQQHPEDLAPATTTTTTSAELALARKKKEEIKEQKKKDEEGLHLLTLLLQCAEAVSAENLEQANKMLLEISQLSTPFGTSAQRVAAYFSEAISARLVSSCLGIYATLPVSSHTPHNQKVASAFQVFNGISPFVKFSHFTANQAIQEAFEREERVHIIDLDIMQGLQWPGLFHILASRPGGPPYVRLTGLGTSMETLEATGKRLSDFANKLGLPFEFFPVAEKVGNIDVEKLNVSKSEAVAVHWLQHSLYDVTGSDTNTLWLLQRLAPKVVTVVEQDLSNAGSFLGRFVEAIHYYSALFDSLGSSYGEESEERHVVEQQLLSREIRNVLAVGGPSRSGEIKFHNWREKLQQCGFRGVSLAGNAATQASLLLGMFPSEGYTLVEDNGILKLGWKDLCLLTASAWRPPYHTNTIIPHHN

SEQ ID NO: 767 - protein, 196 aa, Persea borbonia
KRRNGLLKKAYELSVLCDAEVALIVFSNRGRLYEYSSNSVKATIERYKKASADTSNSGSISEVSTQYYQQEASKLRQQIGILQNANRHLMGEALSTMSVKELKQLETRLEKGISRIRSKKNELLFAEIEYMQQREIDLQNSNMYLRAKISENERARQNMNVLPAHEYEVMPAFDSRNFLHVNLLETHHGYSNHEQT

SEQ ID NO: 768 - protein, 217 aa, Zea mays
  misc_feature (165)..(165): Xaa can be any naturally occurring amino acid
MEDDEEKPSQRITNKEEDEEDDDLVFPGFRFHPTDLELVGFYLKRKVEKKGFRIDIIREIDIYKHDPWDLPSKSEGGDKDDWYFFCLRGRKYRNSIRPNRVTGSGFWKATGIDKPIHDGAGERVVGLKKSLVYYRGSAGRGNKTDWMMHEFRLPSAELVELHDAXQSQGIWTICRIFKRNTSYTRRCQQQKQEPPAMSSVLTTPPSKPRALFCCRHA

SEQ ID NO: 769 - protein, 151 aa, Persea borbonia
RYKKVCADSSNGGSSTELNTHFYQQESSKLGQRIGILQNANRHLMGEALSSMTVKELKQLESKQVKGITRIRSKKNELLFAEIECMQKREVELQNDNMYLRAKIAENEKNQQHMSMLPTPEYDVMPSFDSRNFLQVNLLEPNHHYNRQDQT

SEQ ID NO: 770 - protein, 222 aa, Glycine max
MCMMEGDENIQASTKGKNVESFTSLEAPRKKSKKIENKRRFSDEQIRSLECIFESESKLEPRKKMQLARDLGLQPRQVAIWFQNRRARWKSKRIEQEYRKLKDEYDNLASRFESLKKEKDSLQLELQKLSDLVVTSQDGGREDKDGKENSIEDGGSGNDQNENSIIRGVEKSEDKGHQLLRMDDHDHADMPLASLEKWYSGVDPSGILDQSCSSSQWLDFWT

SEQ ID NO: 771 - protein, 262 aa, Zea mays
  misc_feature (106)..(106): Xaa can be any naturally occurring amino acid
MKRPRGASPPLAAMTNPNDDGYGVVGMEADADADADEEMMACGGGGEKKRRLSSEQVRALERSFEVENKLEPERKARLARDLGLQPRQVAVWFQNRRARWKTKQLXERDYSALRQSYDALRHDHDALRRDKDALLAEIKELKAKLGDEEAAASFTSVKAEPAASDGPPPVGVGSSESDSSAVLNDADPPVAEAPVPEVRGTLLDAPGAVAANHGGVFFHGSFLKVEEDETGLLDDDEPCGGFFSVEQPPPMAWWTEPTEHWN

SEQ ID NO: 772 - protein, 221 aa, Glycine max
HFIHDCIYYSTGVPRKKIIDWIFFITILSAPSVEIDGSLGDSDSLKESGSKKRVRSESCAASGSKACREKLRRDRLNDKFVELGAILEPGRPAKTDKAAILIDAVRMVTQLRGEAQKLKDTNQGLQEKIKELKAEKNELRDEKQRLKAEKEKLEQQLKSLNAQPSFMPPPAAIPAAFAAQGQAHGNKLVPFISYPGVAMWQFMPPAAVDTSQDHVLRPPVA

SEQ ID NO: 773 - protein, 203 aa, Arabidopsis thaliana
MGEELADTMNLDLNLGPGPESDLQPAPNETVNLADWTNDPPERSSEAVTRIRTRHRTRFRQLNLPIPVLSETHTMAIELNQLMGNSVNRAAMQTGEGSERGNEDLRMCENGDGALGDGVLDKKADVEKSSGSDGNFFDCDICLGLSKEPVLTCCGHLYCWPCLYQWLRISDAKGCPVCEGEVTSKTVTPIYGRWKHKREIEKI

SEQ ID NO: 774 - protein, 267 aa, Triticum aestivum
  misc_feature (132)..(132): Xaa can be any naturally occurring amino acid
MAPQSLDLGLSLGLGLVSRPSQPSFWYSGGNVAADQEVGPTPTAAAVEERRCSPGSPASSGSGSGLKRGAERSAGSGDEDQDDDGGNARKKLRLSKDQAAVLEECFKTHHTLTPKQKLALANSLGLRPRQVXEVWFQNRRARTKLKQTEVDCEYMKRWCEQLAEQNRRLEKEVAELRALKAAPPAHNGAAAGPLTTLTMCLSCKRVASTSSASACTVPSFSANAGIGMPMPSPVAQPEHRQFFCGFRDTGAAYGGPAGLTKVVKAAR

SEQ ID NO: 775 - protein, 256 aa, Oryza sativa (indica cultivar-group)
MDGGYGSVTIVHDARSPEDVFQDFCGRRSGIVKALTIEVEKFYKQCDPEKENLCLYGLPNGTWAVTLPADEVPPELPEPALGHNFARDGMQEKDWLSLIAVHSDSWLLSVAFYFGARFGFDKKARERLFMMTSSLPTVFEVVSGGVNTQSKTANGSSKNKSGSKPPKRPNSDSKPQKQVQAKYEEENGGRGNGGDEDQAETICGACGEAYANGEFWICCDICETWFHGKCVRITPAKAEHIKHYKCPGCSNKRTRE

SEQ ID NO: 776 - protein, 374 aa, Oryza sativa (indica cultivar-group)
MASKAGGGGVARRGGGRMRSLGRQGSMYSLTLDEVQSQLGEPLHSMNLDELLRSVFPDGLAIADGAGAGAGATTSSQQHQPGSGLLRQGSITMPPELSKKTVDEVWKGIQAAPKRNAETGGGGGGGGGGGRRRRERQPTLGEVTLEDFLVKAGVVTQGSLKELSDVGNVDPVGRGVTATGTVDLAPGSHWIEQYKQQIASTDAHHHGQQGVQGAYFPNRLVPQPLNVGPGAILEPSYSDGQTSSGMIGGMSDSQTPGRKRGMSGDVADKLMERRQKRMIKNRESAARSRARKQAYTNELENKVSRLEEENVRLKRQKESDYLHYTRSNLVMENIEIHRSLINSNIIIWYDVLYYFIGSASSYNQEVFVMVIVCV

SEQ ID NO: 777 - protein, 286 aa, Ustilago maydis 521
MRTAVRNQQPLARNAIPVAAAANFATVPAPKETKKRASSTTKTAKAGASKAGAAAAAVVDAAATTKKTGAKPKAPKKEKLKPWQARGADGKLLPLPSASKPTLRSSFLIYMSERVSQLKGEPQYQKTSPKTGAQVVDIVKMAKAVGAEWAQLPAHLKSRYEAQHEQEKEQYERALAEWKAALSPEDIKRQNAYIASQKKKGIKGTAFLRDPAKPKRPNSAFFEFLNDLRASEAVIPNITEFSKRGGERWKQMSAEQKAPYEQRALQALEQYKRDLELYNSTRGPEL

SEQ ID NO: 778 - protein, 338 aa, Oryza sativa (indica cultivar-group)
MGECKVGGGGGGGDCLIKLFGKTIPVPEPGACAAGDVDKDLQHSGSSTTEPKTQENTVQDSTSPPPQPEVVDTEDSSADKNSSENQQQQGDTANQKEKLKKPDKILPCPRCSSMDTKFCYYNNYNINQPRHFCKNCQRYWTAGGAMRNVPVGAGRRKSKSVSAASHFLQRVRAALPGDPPLYAPVKTNGTVLSFGSDLSTLDLTEQMKHLKDKFIPTTGIKNTDEMPVVSTMTNCFRLGKHPRDGDEELDSKGNGKVWVPKTVRIDDVDEVARSSIWSLIGIKGDKVGADHGRGCKLAKVFESKDEAKTSTHTAISSLPFMQGNPAALTRSVTFQEGS

SEQ ID NO: 779 - protein, 279 aa, Arabidopsis thaliana
AVFVVETYSSLFLFLGMETLHPFSHLPISDHRFVVQEMVSLHSSSSGSWTKEENKMFERALAIYAEDSPDRWFKVASMIPGKTVFDVMKQYSKLEEDVFDIEAGRVPIPGYPAASSPLGFDTDMCRKRPSGARGSDQDRKKGVPWTEEEHRRFLLGLLKYGKGDWRNISRNFVVSKTPTQVASHAQKYYQRQLSGAKDKRRPSIHDITTGNLLNANLNRSFSDHRDILPDLGFIDKDDTEEGVIFMGQNLSSENLFSPSPTSFEAAINFAGENVFSAGA

SEQ ID NO: 780 - protein, 276 aa, Zea mays
MISGNLTNEDLGAGRTKAEGPTTAARAVVAKSPVLPSSRHWPPSTESRIVRVSRVFGGKDRHSKVRTVKGLRDRRVRLSVPTAIQLYDLQDRLGLSQPSKVVDWLLDAAQHEIDKLPPLQFPPQAAQDLVAHLPPPSMVAPFAADRAEADGDKRHCHAGVKGLMGLNNSIRLVNATMPLAHGLYYTPGESWTGTNADDAAAHDHQTVAHGHSPFSSLLSLAAPGPQLVFYSSEGGGFTMKEEATGYQFPVQNSLDHSQGQLSLSSARSFLRPGNQG

SEQ ID NO: 781 - protein, 268 aa, Oryza sativa
  misc_feature (241)..(241): Xaa can be any naturally occurring amino acid
  misc_feature (253)..(253): Xaa can be any naturally occurring amino acid
MGRGKVQLKRIENSMNRQVTFSKRRNGLLKKAHEISVLCDAEVAAIVFSPKGKLYEYATDSRMDKILERYERYSYAEKALISAESESEGNWCHEYRKLKAKIETIQKCHKHLMGEDLESLNLKELQQLEQQLESSLKHIRSRKSHLMLESISELQKKERSLQEENKALQKELVERQKNVRGQQQVGQWDQTQVQAQAQAQPQAQTSFFFFFMLRDQQALLSPQNICYPPVMMGQRNDAAAXAAVAAQGQVQLXRIGGFPPWMLSTFKA

SEQ ID NO: 782 - protein, 384 aa, Oryza sativa (indica cultivar-group)
MASNGMASSPSSFFPPNFLLHMAQQQAAPPHDPQEHHHHHHHGHHHEQQQHHHHLGPPPPPPPHPHNPFLPSSAQCPSLQEFRGMAPMLGKRPMSYGDGGGGGDEVNGGGEDELSDDGSQAGEKKRRLNVEQVRTLEKNFELGNKLEPERKMQLARALGLQPRQVAIWFQNRRARWKTKQLEKDYDALKRQLDAVKAENDALLNHNKKLQAEERRSMWVSVLAERLLESVPFSPPRIVALKGREAASELINLNKETEASCSNRSENSSEINLDISRTPPPDAAALDAAPTAHHHHHGGGGGGGGGGGMIPFYTSIARPASGGGVDIDQLLHSSSGGAGGPKMEHHGGGGNVQAASVDTASFGNLLCGVDEPPPFWPWPDHQHFH

SEQ ID NO: 783 - protein, 276 aa, Zea mays
CAGAVLNIGLQAAEAKGPDGKRCRVGGSDSPVKPKVEEVAASDASVELKAQKKGKGKTAKPAVEPPKDYVHVRARRGQATDSHSLAERVRREKISQRMKFLQDLVPGCNKVVGKALMLDEIINYVQSLQQQVEFLSMKLATVNPELDFSNLSTLLHKDMYQQPCGGPSASSVFPLESAGAAFPFCEQADLFHSFGSGGSGSGSGMEDQCSLSLLLDTALPHAASPQFAFQKQQRDFWEDGLQNALPTGSEQRQEEDGLLVPNFDGQLHADQTKVEF

SEQ ID NO: 784 - protein, 225 aa, Persea borbonia
KRIENKINRQVTFAKRRNGLLKKAYELSVLCDAEVALIIFSNRGKLYEFCSSSSMLKTLERYQKCNYGAPETTVSTRETQSSHQEYLKLKARVEALQRSQRNLLGEDLGPLTSKELDTLEKQLDASLKQIRSTRTQYMLDQLADLQRREQMLSEANKNLKRRLEEGMQANPQVWDPNGHPVTYGRQQAPPQSDGFFHPLDTCEPTLHIGYQPADQITIAAPGPSV

SEQ ID NO: 785 - protein, 462 aa, Zea mays
MAAGSGGGGGGSLLLRGFLSLFFLLFLHIGHGGSCCFSPGAAARAQQEEDEAAEADGKVVGGGGGSNKRRKISPLIFSPAASSTAVTASDDSAGAPRRHVSSLAASLRLYLHRIFRSGSTGTKNGGTVVAGRDGEEEAVATTVSSPIAQSLPHQPSSTSVVLSTPSSPCAWSSPLMMSPLSVRSLSATPFPSSPQQKLLQASRQSFRSFAARGDVFPCKVCGEVLGRPQLLELHQAMKHSLSELTHLDSSLNIIRMIFLAGWRPAASGAGAGAGAGEAPAVRRVLRIHHNPRALARFEEYRDLVRARAARRCGGEGAVVEERCIADGNERLRFHCSTMLCSLGGGVCGSPYCCVCSTLRHGFAGKQADVDGIATYASAWTAHASLPADVEREFAFLQVRRAMLVCRVVAGRVARGPADDKVAYDSMVPVRGGVGGGTGDDVELLVYNPRAVLPCFVILYSSS

SEQ ID NO: 786 - protein, 608 aa, Glycine max
MAKPSSADGRTRSSVQIFIVVGLCCFFYILGAWQRSGFGKGDSIALEITKTKAECNIVPNLSFDSHHGGEVSEIDEADSKPKVFEPCAARYTDYTPCQDQKRAMTFPRENMVYRERHCPPEEEKLHCMIPAPKGYVTPFPWPKSRDYVPYANAPYKSLTVEKAIQNWIQYEGNVFKFPGGGTQFPQGADKYIDQIASVIPITNGTVRTALDTGCGVASWGAYLWSRNVVAMSFAPRDNHEAQVQFALERGVPAIIGVLGSIKLPYPSRAFDMAHCSRCLIPWGANNGIYMMEVDRVLRPGGYWVLSGPPINWKANYKSWLRPKEELEEEQRKIEETAKQLCWEKRSEKAEMAIWQKVVDSESCQRRKDDSSVEFCESSDADDVWYKKMEACITPTPKVTGGNLKPFPSRLYAIPPRIASGLVPGVSSETYQDDNKKWKKHVKAYKKTNRLLDSGRYRNIMDMNAGLGSFAAAIHSSKLWVMNVVPTIAEANTLGVIYERGLIGIYHDWCEAFSTYPRTYDLIHAHGVFSLYKDKCKAEDILLEMDRILRPEGAVIFRDEVDVLIKVKKIVGGMRWDTKMVDHEDGPLVPEKVLVAVKQYWVTNSTSTQ

SEQ ID NO: 787 - protein, 295 aa, Zea mays
MMRETYMDVLPPVDHIAARSNWFPAAARLWTAAENKQFERALAGLDLCRPDWEEVARAIPGRTVREVVSHFKHLEVDVQQIESGQVPLPAYGGGASSFTLQWDGYGPGPGDFRHGYRFAGGCGRRHHGRTPEQERKKGVPWTEEEHRLFLLGLKKYGKGDWRNISRNFVQTRTPTQVASHAQKYFIRLNSGGKDKRRSSIHDITTVNLTDDQPPSPSQSSLITSQSNAPAPAPAAGICQVPLAADAKRHGAGTLPFSSPNRTSAAPAYRMEFHDQQGLQCGPLHDQLLASQSVLF

SEQ ID NO: 788 - protein, 192 aa, Lupinus microcarpus
SSGPYPYFPSSSSSASYHPFAFFNPENSSSNNTFSHDLLSFPYNIPTTHHYHAPIPETVSNFADCAAASAVMFKNDVSGSNFGLSNFLAKKPASKKDRHSKIHTSQGLRDRRVRLSIEIARKFFDLQDMLGFDKASNTLEWLFNKSKKAMKELARSKNSSSGVVANSFSSSDSEFEVVSMINQDSIDATPEG

SEQ ID NO: 789 - protein, 515 aa, Magnaporthe grisea 70-15
MDSEDEFMSAISSGDEDVMSDNEDMSGAEDFDSELDADLDVDLAKDPPKRKAAHDITFSVYNPDDLRKQQDDLIDEVNMILEMRKEDAAILLRHFGWNRERLIEEYMDNRKKVLEVAGLGPNVGGGPQLQVIPGFCCEICCEDEEGLQSFAMKCGHRYCVDCYRQYLTQKIREEGEAARIQCPSEGCHRIIDAKSLDLLVTPELKERYHVLLQRTYVEDKDTLKWCPGPDCQNAIDCSIKKKDLHRVVPTVTCNCKMRFCFGCTLNDHQPAPCELVKMWLKKCADDSETANWISANTKECPKCNSTIEKNGGCNHMTCRKCRHEFCWMCMGIWSEHGTSWYNCNRFEEKSGTDARDAQAKSRLSLERYLHYYNRYANHEQSARLDKDIYHKTEKKMTMLQTASGMSWIEVQYLEAASQALQTCRQTLKWTYAFAFYLSRNHLTTIFEDNQKDLEMAVEALSEMFEKPVAELADSKQKVEIMDKTAYCNRRRVILLEDTAENLANDIGSSASAGRR

SEQ ID NO: 790 - protein, 220 aa, Oryza sativa (japonica cultivar-group)
MTAALQALLDPTALSLGLPTPAINKEEYLAICLAALACTRAGKALVGVGGQQQVQACNKWLCPAPAAPEELRFRCTVCGKAFASYQALGGHKSSHRKPPSPGDHYGAAAAAQQLASAGDSKEDSASSAAGSTGPHRCTICRRSFATGQALGGHKRCHYWDGTSVSVSVSASASAASSAVRNFDLNLMPLPESTAAAGIKRWAEEEEVQSPLPVKKLRMSN

SEQ ID NO: 791 - protein, 220 aa, Persea borbonia
KRIENKINRQVTFAKRRNGLLKKAYELSVLCDAEVALIVFSTRGKLYEFCSTASMLKTLERYQKCNYGAPETTVSSRELQSSHQEYMKLKARVEALQRSQRNLLGEDLGPLTGKELDTLEKQLDVSLKHIRSTRTQYMLDQLGDLQRREHMLSEANKSLRRRLEEGMQENPNHAWDPNGYVRQQAPPQSDGFFHPIECEPTLQIGYQSSQITIAAPGPNV

SEQ ID NO: 792 - protein, 264 aa, Hordeum brevisubulatum
MTRKKKVRRRSTGPDSVAETIKKWKEQNQKLQQENGSRKAPAKGSKKGCMAGKGGPENSNCAYRGVRQRTWGKWVAEIREPNRGNRLWLGSFPTAVEAARAYDDAARAMYGATARVNFPEHSPDANSGCTMAPSLLLSNGATAVSHPSDGKDESESPPSLVSNAPTAALHRSDAKDEFESSGTVAHKVKAEVSNDLRSTHEEHKALEVTQPKGKALHKEANVSYDYFNVEEVLDMIIVELSADVKMEAHEEYQEGDDGFSLFSY

SEQ ID NO: 793 - protein, 191 aa, Berberis gilgiana
TGIVKKARELTVLCDAEVSLIMFSSTGKLSEYISPSTTTKRLFDQYQQMTGINLWTTHYERMQESLKKQNDTNMRLRREISQRMGECLDELNFDELHSLEQDLSGSLKVVRDRKYHMIGTQTETYRKKLRNLEETHKNLVREFEIRGEDPYYEADMETSMDVVNGLYDYRLQLNQPNLRGEGFQEYFGVMH

SEQ ID NO: 794 - protein, 239 aa, Persea americana
MGRGRVQLKRIENKINRQVTFSKRRMGLLKKAHEISVLCDAEVALIIFSTKGKLYEYATDSSMSKILERYERYSYAERELVLPGQASEGNWCQEYGKLKARVEALQRNLRHFMGEDLDSLSVRELQQLEQQLDVALRHVRSRKIQVMFDSISELQTKEKALQEQNIMLEKKLQEKEKAAAQQAHRHSPSLLLPTPLPTLNIGSYTHSSSVGVAAEEEVGARPLARTNSLVPPWMLRHIN

SEQ ID NO: 795 - protein, 250 aa, Oryza sativa (japonica cultivar-group)
MAVEAVLEASRSSSEEEAEVIVTHGGGGGGGGGGGQVEGWGKRKRSRRRRPQLPPSEEEYLALCLLMLARGRRDGDDVAASASAAAAAVEHRCSVCGKAFASYQALGGHKASHRKPPPPPPPAMVDDDEVVVETKPAAIATPSSSASGVSGGGGGRAHECNVCGKAFPTGQALGGHKRCHYDGTIGSAAGAGASKPAAKTTVAVAASRGFDLNLPALPDVAAAADQRCAAEDDEVLSPLAFKKPRLMIPA

SEQ ID NO: 796 - protein, 637 aa, Oryza sativa (japonica cultivar-group)
PEPPHRLTPPPPPPRGVPFHRVAFRPSPAERFMRGSRMNPGDRRTRSTMSIVIVMSLCCFFYILGAWQKSGTGRGDSIALRVTKETDCTILPNLHFETHHSLGGVNPLVMTDKVFEPCHIRYSDYTPCQDQNRAMNFPRENMNYRERHCPTETKKLRCLIPAPKGYVTPFPWPKSRDYVPYANAPYKNLTVEKAVQNWVQFEGDVFRFPGGGTMFPNGANAYIDELASVIPFTDGTIRTALDTGCGVASWGAYLMDRNVLTMSFAPRDSHEAQVQFALERGVPAVIGVLGTIKLPYPSGSFDMAHCSRCLISWKSNDAMYMFEVDRVLRPGGYWILSGPPINWKTNHQAWKRSKEDLEAEQNVIEKIAEMLCWGKIHEKGDTVIWRKKADSNECHNKDDHPSKMCKIQDADDVWYKKMEGCITPFPEEAQLRKFPERLFAAPPRILQGRTPGVTEEIFEEDNKLWKKYVSTYKRINKLIGSLRYRNIMDMNAGLGSFAAIIDSPISWVMNVVPTISEKNTLGIIYERGLIGIYHDWCEAFSTYPRTYDLIHANGLFSLYQNKCNMEDILLEMDRILRPEGAVILRDNVEVLNKVRRTVMGMRWKSKLLDHEDGPHIPEKILVSVKKYWVGNEEENSS

SEQ ID NO: 797 - protein, 223 aa, Persea americana
MGRGKIEIKRIENTTNRQVTFCKRRNGLLKKAYELSLLCDAEVALIVFSSRGRLYEYANNSVKTTIERYKKASADTSNGGSTTEVNSQFYQQESSKLRQQIGILQNANRHLMGEALSSMTVKELKQLETRLEKGISRIRSKKNELLFAEIEYMQKREVDLQNDNLYLRAKIAENERAQQHMNMLPAPEYDVMPAFDSRNFLQVNLLEPNNHYSHQEQTALQLG

SEQ ID NO: 798 - protein, 340 aa, Paulownia kawakamii
MNDGPEVCRKVRTRRPIQTGQSSLGPDARHTDPPGPPPPGPLGDLLPFPYARRHPPRRRPSWPQPRPPPNPSFPPSQWAAAVGPAQQDQRDQACVPFKDPAGRRGLFRWAWIGRPAAGFDGGGSSPGPRHGHSNSVDEYSSAMSSELDSIAKRAMAADRLAELSLIDPKRAKRILANRQSAARSKERKTRYTSELERKVQTLQTEATTLSAQITLLQRDTTGLTTENKELKMKLQAMEQQAHLRDALNEALKDELQWLKIAAGQVPGVNGNNRGSFSQFSSQPPTIRYFGNHLAQQQQQQQQQQQQQQQQQPLHMPHSSANNPRLGGQSQLSFQDFNHRV

SEQ ID NO: 799 - protein, 270 aa, Oryza sativa
MGRGRIEIKRIENTTSRQVTFCKRRNGLLKKAYELSVLCDAEVALIVFSSRGRLYEYSNNNNVKATIDRYKKAHACGSTSGAPLIEVNAQQYYQQESAKLRHQIQMLQNTNKHLVGDNVSNLSLKELKQLESRLEKGIAKIRARKNELLASEINYMAKREIELQNDNMDLRTKIAEEEQQLQQVTVARSAAMELQAAAAAQQQQQNPFAVAAAQLDMKCFFPLNLFEAAAQVQAVAAQRQQIIPTELNLGYHHHLAIPGATAADAPPPHF

SEQ ID NO: 800 - protein, 302 aa, Brassica napus
  misc_feature (94)..(94): Xaa can be any naturally occurring amino acid
MASNNNNPHENLSDQTPSDDFFEQILGLPNFSASSSDGGLGGGGAPPMMLQLGSGEEGGHMGGLGGGSGFHNQMFPLGLSLEQGKGQGFLRPEXGGSLGTGKRFSDDVMKPVFHGQPMQQQPAPAAPHQPTSIRPRVRARRGQATDPHSIAERLRRERIAERIRALQELVPTVNKTDRAAMIDEIVDYVKFLRLQVKVLSMSRLGGAGAVAPLVTDMPLSSSVEDETSEGGRTPQLAWEKWSNDGTERQVAKLMEENVGAAMQLLSSKALCMMPISLAMAIYHSQPPDTSSVVKPETNPPPQ

SEQ ID NO: 801 - protein, 364 aa, Brassica rapa subsp. pekinensis
MNTTTSTHFVPPTRFEIYDPLNQIGTMWEESFKNNGGGFYTPNSIIIPTNQKPYSLSEDGTEGTPHKFDQEASTSRHPDKTQRRLAQNREAAKKSRLRKKAYVQQLETSRLKLIHLEQELDRARQQGFYASNRVDTNALSFSDNMCSGIVAFEMEYGHWVEEQNRQISELRTVLNGQVSDIELRLLVDNAMKHYFQLFRMKSAAAKLDVFYIMSGMWKTSAERFFLWIGGFRPSELLKVLLPHFDPMMDQQVLDVCNLRQSCQQAEDAVSQGMEKLQHTLAESVAAGELGEGSYVPQITSAMERLEALVSFVNQADHLRHETLQQMHRILTTRQAARGLLALGEYFQRLRALSSSWETRQREPT

SEQ ID NO: 802 - protein, 195 aa, Brassica napus
MEIEKVEDSAALGDSGGDFDCNICLDQVRDPVVTLCGHLFCWPCIYKWTYSTNNTRRRVDQYDKKESPKCPVCKSDVSDATLVPIYGRGQRIPQSGSNVPNRPSGPLYDSRGVGQRLGEGESQRYTYRMPDPVMGVVSEMVYRRLFGESSTNMTPYRSDHDISLRSMRRTMQVDESLSRVYLFLLCFMVMCLLLF

SEQ ID NO: 803 - protein, 127 aa, Triticum aestivum
MLLAGPQPPTPPLLLPESSGEDGGAHDHDSSSRASAPKKRAETWVQDETLSLIALRREMDNHFNTSKSNKHLWEAISAKMREQGFDRSPTMCTDKWRNLLKEFKKARSKPARRRRRERSAKMATTGD

SEQ ID NO: 804 - protein, 190 aa, Lupinus lepidus
  misc_feature (156)..(156): Xaa can be any naturally occurring amino acid
SSGPYPYFSSSSSPYHPFAFFNPENSSSNNTFSHDLLSFPYNIQPTHHYHAPTQETLSNFADCAASAAMFRNDVCGNSNFGFSNFLAKKPASKKDRHSKIHTSQGLRDRRVRLSIEIARKFFDLQDMLGFDKASNTLEWLFNKSKKAMKELARSKXSSSGAVANSFSSSDSEFEVVSMINQDSIDATPEG

SEQ ID NO: 805 - protein, 190 aa, Lupinus lepidus
SSGPYPYFSSSSSPYHPFAFFNPENSSSNNTFSHDLLSFPYNIPTTHHYHAPTQETLSNFADCAASAAMFKNDVCGNSNFGFSNFLAKKPASKKDRHSKIHTSQGLRDRRVRLSIEIARKFFDLQDMLGFDKASNTLEWLFNKSKKAMKELARSKNSSSCVVANSFSSSDSEFEVVSMINQDSIDATPEG

SEQ ID NO: 806 - protein, 251 aa, Arabidopsis thaliana
MGRGRVELKRIENKINRQVTFAKRRNGLLKKAYELSVLCDAEVALIIFSNRGKLYEFCSSSSMLRTLERYQKCNYGAPEPNVPSREALAVELSSQQEYLKLKERYDALQRTQRNLLGEDLGPLSTKELESLERQLDSSLKQIRALRTQFMLDQLNDLQSKERMLTETNKTLRLRLADGYQMPLQLNPNQEEVDHYGRHHHQQQQHSQAFFQPLECEPILQIGYQGQQDGMGAGPSVNNYMLGWLPYDTNSI

SEQ ID NO: 807 - protein, 190 aa, Lupinus latifolius
SSGPYPYFSSSSSPYHPFAFFNPENSSSNNTFSHDLLSFPYNIQPTHHYHAPTQETLSNFADCAASAAMFKTDVSGNSNFGFSNFLAKKPASQKDRHSKIHTSQGLRDRRVRLSIEIARKFFDLQDMLGFDKASNTLEWLFNKSKKAMKELARSKNSSSCVVANSFSSSDSEFEVVSMINQDSIDATPEG

SEQ ID NO: 808 - protein, 685 aa, Glycine max
  misc_feature (317)..(317): Xaa can be any naturally occurring amino acid
APTRPYGCEKTTEGGLNKEVPNIVSEFVGGTSLEIQERYKTIKEKNIGRLDQPSQNSGEYESTIGICVEKTLSAALDSFDNLFCRRCLIFDCRLHGCSQPLIYHSEKQTVWSDPEGDRKPCSDQCYLQLKVVKNVTEDSTSGSDQNKRTTITEEADVILAPSIIEEPSNQSIVPFPTEVDCLGSLNLNVPISGTREKWKVPNQSDTALRDSSLPPDDSQHSYKKLKTISDDVVTANSDSSKNINFGACDESIHTITSGLLDKSVKDNSNKLIDSSSTCCSDEQDKSIGDGPKDPTNKTEFKKLSNSMEGKVDGMLRXSDWKPLEKELYLRGVEMFGRNSCLIARNLLSGLKTCMEISSYMHSGGVSMPHAPPVAPSSIMEEKGKFDADCTDQEMPSRSRLLRKRGKTRKFKYSWKSAGHPSIWKRIADGKNQSCKQYTPCGCQSMCGKECTCINGGTCCEKYCGCSKSCKNRFRGCHCAKSQCRSRQCPCFAAGRECDPDVCRNCWVSCGDGSLGEPPRRGEGQCGNMRLLLRQQQRILLAKSDVAGWGAFLKNPVNKNDYLGEYTGELISHREADKRGKIYDRANSSFLFDLNDQYVLDAYRKGDKLKFANHSSNPNCYAKVMLVAGDHRVGIFAKEHIDASEELFYDYRYGPDQAPPWARKPEGSKRDESTAPQGRAKKHQSH

SEQ ID NO: 809 - protein, 393 aa, Debaryomyces hansenii CBS767
MDRYEENYLDGSEIATLQHQEQEEQEEQIPSHPAPTQNIVDEEELLAAQAAAEAAAAAQLQQPGGAFNNVGQGLTGVYRDMMMQYWQETINSIEHDEHDFKNHQLPLARIKKVMKTDEDVRMISAEAPILFAKGCDVFITELTMRAWIHAEENKRRTLQKSDIAAALTKSDMFDFLIDIVPREEEKPKKSYSSLSRSGSYANIPPNSNPTLSNASQQQIPTSQPKNISHIPGNINEDQDIKNDDRQINDPQILHQQMLQQQMLQQQQQQQQQQQQPPPPPQQPQHQQQAQHQQHQQQLEQQQLEQQQLEQQQLEQQQQQQQQQQQQQQQQQQQQQQQQKDQSQAEQPEPQLPPQQIKLEQNYSEMPQFPEGTTQPPQISNRNEFQNFNFQVYE

SEQ ID NO: 810 - protein, 277 aa, Oryza sativa (japonica cultivar-group)
MKRPGGAGGGGGSPSLVTMANSSDDGYGGVGMEAEGDVEEEMMACGGGGEKKRRLSVEQVRALERSFEVENKLEPERKARLARDLGLQPRQVAVWFQNRRARWKTKQLERDYAALRHSYDSLRLDHDALRRDKDALLAEIKELKAKLGDEEAAASFTSVKEEPAASDGPPAAGFGSSDSDSSAVLNDVDAAGAAPAATDALAPEACTFLGAPPAAGAGAGAAAAASHEEVFFHGNFLKVEEDETGFLDDDEPCGGFFADDQPPPLSSWWAEPTEHWN

SEQ ID NO: 811 - protein, 198 aa, Gossypium barbadense
MCGGAIISDFVAPKYDRKLTGDDLWSELDIFSDLLGFDNNGKSFVNHQFHNNNNNKLINPKDNQLNKERSETIQKTSQVTKKVEKTQRTRKNFYRGIRQRPWGKWAAEIRDPQKGVRVWLGTYNTAEEATRAYDEAAKRIRGDKAKLNFPQTPTKNQAASPALTLLPPAKKRCIVPGVNSTEFTRLDSPPISLWVLGV

SEQ ID NO: 812 - protein, 317 aa, Zea mays
  misc_feature (269)..(269): Xaa can be any naturally occurring amino acid
MSLISMMEARLPPGFRFHPRDDELVLDYLCRKLSGKGGGGAYGGIAMVDVDLNKCEPWDLPDEACVGGREWYFFSLHDRKYATGQRTNRATRTGYWKATGKDRPISVSGRRGAGDTAALVGMRKTLVFYQGRAPRGSKTEWVMHEFRVDGPPVADRPGSPLLQLQLQEDWVLCRVFYKSRTASTRPAAGPDEAGPLSSQLIGGLPMPRMAAPADAAYLSFDVTPAAGGYYHHQDSGPADARHHLPPPPAQPFSRSSLSSLRDLLSSMVXGSDAAAAVRETELHLQLEGWTEAAYAQQQGGAMPAHPQQTWSPFLSSG

SEQ ID NO: 813 - protein, 204 aa, Persea borbonia
TNRQVTFCKRRNGLLKKAYELSLLCDAEVALIVFSSRGRLYEYANNSVKTTIERYKKASADTSNGGSTTEVNSQFYQQESSKLRQQIGILQNANRHLMGEALSSMTVKELKQLETRLEKGISRIRSKKNELLFAEIEYMQKREVDLQNDNLYLRAKIAENERAQQHMNMLPAPEYDVMPAFDSRNFLQVNLLEPNNHYSHQEQT

SEQ ID NO: 814 - protein, 307 aa, Oryza sativa (japonica cultivar-group)
MILGSNQAAAAAAAAAAAEEEAAELARKHTAAVATSRQWSAQTESRIVRVSRVFGGKDRHSKVKTVKGLRDRRVRLSVPTAIQLYDLQDRLGLNQPSKVVDWLLNAARHEIDKLPPLQFPPQDHLCMGHHHHLPSAMPLMHHHGHHHHADDDKYHVAAAAAALAAEKEAAAAGGGGGGGGDDVDGGGGGGAAHIVGRFPAGGYHRFMGLNNPLGMVNSAAGAAMPFHYAGESWNNGSVQDSGAGSPQVAAAAAHHTSPFPSLLSLAPGPHHQLVFYSSEAEQFTVDNLGSQGLSLSSARAFHDQTGS

SEQ ID NO: 815 - protein, 319 aa, Gossypium barbadense
MSNVYLWFMYPYDIKFFFLCSIIEGSNSEKSMQFDGQAEKCAKRKRKNQYRGIRQRPWGKWAAEIRDPRKGVRVWLGTFNTAEEAARAYDAEARRIRGKKAKVNFPNETPRTSPKHAVKTNSQKPLSKSNLSPVQLNLDQNYNYLSQPEQEYFDTMGFVEEKPLVNQFAYVDPVPTSIDAGSNQSDNAPLYFNSDQGSNSINCSDYGWGEQGARTPEISSILEASVVGEEFLEDANPSKKLKPSSDNVMPAEDNSAKTLSDELLALDNQMKYFQMPPFIEGNWDATIDAFLNGDATQDGGNPMDLWNFDDFPTMAEGVF

SEQ ID NO: 816 - protein, 616 aa, Gossypium barbadense
MKRDHNHLQPNPDPSSLRGAPSTGKAKVWDEESAQQDCGMDELLAVLGYKVKTSDMAEVAQKLEQLEEVMCNVQDDGISHLASETVHYNPSDLSTWLESMLSELNPPSTFDPFGAAGTAAAALDDSFLVPAESSTLTTLDFDNINRKHQKSGQQIFEEASCSDYDLKAIPGKAIYSQKTQPQTHDSSSSSTPTNVKSEKRFKSTSGPPSPSDIFPPPPPPAAASYGIPTASTRPVVLVDSQENGIRLVHALMACAEAVQQNNLNLAEALVKQIGFLAISQAGAMRKVATYFAEALARRIYRFYPQNPLDHSFSDVLHMHFYETCPYLKFAHFTANQAILEAFEGKKRVHVIDFSMNQGMQWPALMQALALRVGGPPAFRLTGFGPPSHDNSDHLQEVGCKLAQFAKKIHVEFEYRGFVANSLADLDASMLDLRPSEVEAVAVNSVFELHKLLARPGAIDKVFSVVKQMKPELVTIVEQEANHNGPVFLDRFTESLHFYSTLFDSLEGSVSSQDKVMSEVYLGKQICNVVACEGVDRIERHESLTQWRNRLSTAGFSPVHLGSNAFKQASMLLALFAGGDGYGVEENNGCLMLGWHNRPLITTSAWKLTNKTTAISQ

SEQ ID NO: 817 - protein, 151 aa, Arabidopsis thaliana
MASSSSRGEMEKMGIDQLKALKEQADLEVNLLQDSLNNIRTATVRLDAAAAALNDLSLRPQGKKMLVPLTASLYVPGTLDEADKVLVDIGTGYFIEKTMDDGKDYCQRKINLLKSNFDQLFEVAAKKKSVADEAGMVLQAKVKQLTAATTS

SEQ ID NO: 818 - protein, 216 aa, Saccharomyces cerevisiae
MIQREEMNMPRQYSEQQQLQENEGEGENTRLPVSEEEFRMVQELQAIQAGHDQANLPPSGRGSLEGEDNGNSDGADGEMDEDDEEYDVFRNVGQGLVGHYKEIMIRYWQELINEIESTNEPGSEHQDDFKSHSLPFARIRKVMKTDEDVKMISAEAPIIFAKACEIFITELTMRAWCVAERNKRRTLQKADIAEALQKSDMFDFLIDVVPRRPLPQ

SEQ ID NO: 819 - protein, 597 aa, Arabidopsis thaliana
MCGAKSNLCSSKTLTEVEFMRQKSEDGASATCLLEFAACDDLSSFKREIEENPSVEIDESGFWYCRRVGSKKMGFEERTPLMVAAMYGSMEVLNYIIATGRSDVNRVCSDEKVTALHCAVSGCSVSIVEIIKILLDASASPNCVDANGNKPVDLLAKDSRFVPNQSRKAVEVLLTGIHGSVMEEEEEELKSVVTKYPADASLPDINEGVYGTDDFRMFSFKVKPCSRAYSHDWTECPFVHPGENARRRDPRKYPYTCVPCPEFRKGSCPKGDSCEYAHGVFESWLHPAQYRTRLCKDETGCARRVCFFAHRRDELRPVNASTGSAMVSPRSSNQSPEMSVMSPLTLGSSPMNSPMANGVPLSPRNGGLWQNRVNSLTPPPLQLNGSRLKSTLSARDMDMEMELRFRGLDNRRLGDLKPSNLEETFGSYDSASVMQLQSPSRHSQMNHYPSSPVRQPPPHGFESSAAMAAAVMNARSSAFAKRSLSFKPAPVASNVSDWGSPNGKLEWGMQRDELNKLRRSASFGIHGNNNNSVSRPARDYSDEPDVSWVNSLVKENAPERVNERVGNTVNGAASRDKFKLPSWAEQMYIDHEQQIVA

SEQ ID NO: 820 - protein, 208 aa, Triticum aestivum
  misc_feature (70)..(70): Xaa can be any naturally occurring amino acid
  misc_feature (129)..(129): Xaa can be any naturally occurring amino acid
  misc_feature (159)..(159): Xaa can be any naturally occurring amino acid
MGHQHQMFEDPFASSISSLEADIFSVAAGHHHPQWPGLDHDVPLAPAANNGTSSGGYGSPGGGDGSGSHXRKISHNAYERDRRKQLNELYSDLRSLLPDTDHTKKLSIPITVSRVLKYIPELQKQVERXLRRRRRSLTRASCKPGVLTMKGDTAPIVSXATCLDDREIMVQVNLVSTMGGVCHVKCSGAETKARLIVVTPVQTDSIFI

SEQ ID NO: 821 - protein, 91 aa, Gossypium barbadense
MDGAPYLRKIDLKIYSGYPELLQAIENMFKFTIGEYSEREGYKGSDYAPTYEDKDGDWMLVGDVPWEMFITSCKRLRIMKGSEARGLGCGV

SEQ ID NO: 822 - protein, 248 aa, Arabidopsis thaliana
MDTRKRGRPEAGSFNSNGGGYKKSKQEMESYSTGLGSKSKPCTKFFSTSGCPFGENCHFLHYVPGGYNAVSQMTNMGPPIPQVSRNMQGSGNGGRFSGRGESGPGHVSNFGDSATARFSVDASLAGAIIGKGGVSSKQICRQTGVKLSIQDHERDPNLKNIVLEGTLEQISEASAMVKDLIGRLNSAAKKPPGGGLGGGGGMGSEGKPHPGSNFKTKICERFSKGNCTFGDRCHFAHGEAELRKSGIV

SEQ ID NO: 823 - protein, 473 aa, Zea mays
MAGEEAAEGSGTRRHMDLNLYLGLPPLPRPPVWLDPTLMPNLTGAAPESSITGEPEESLALGAAAYSPSNALSTPEEHPMLDPIVYSWLDGNRTDGEEDTDAPEPGPVDGANVSRSQLVVAATGLEGDDDLPLVRFVRPSQMVVAGGMETVNTSILQQSIQRAAAIEARTPELRFQRVIQISQQHRIVRPASVNRSQGAASTDADRLVWAIQRTHNSLEATRRQKLDDNNLCGNGSAKKDESCDCNSSFECNICLDPAKQPVVTPCGHLFCWPCLYQWLHAHSPHSECPVCKGEVLELNVTPIYGRGGEEGNSTNPDFPPRPRANRRESLRQQLQMTDTRGIATVVRQLIQNQGIISVLPSPTGIEMSVVPAGRQRARARRQQRQDNNASSSIHVVAQNMGNVAPESSNQIQLSHSNGDNAAQMVLAAPQQSSSVEQLSTSSTTAVILGEPGSSRRSRPSESPTIRRTRRRPQ

SEQ ID NO: 824 - protein, 418 aa, Arabidopsis thaliana
MLSLEMPQNPPNPQNSIQFQHPHPYTTSGDQQTQPPIKSLYPYASKPKQMSPISGGGCDDEDRGSGSGSGCNPEDSAGTDGKRKLSQWHRMKWTDTMVRLLIMAVFYIGDEAGLNDPVDAKKKTGGGGGGGGGGGMLQKKGKWKSVSRAMVEKGFSVSPQQCEDKFNDLNKRYKRVNDILGKGIACRVVENQGLLESMDHLTPKLKDEVKKLLNSKHLFFREMCAYHNSCGHLGGHDQQPPQQNPISIPIPSQQQNCFHAAEAGKMARIAERVEVEEEVESDMAEDSESEMEESEEEETRKKRRISTAVKRLREEAASVVEDVGKSVWEKKEWIRRKMLEIEEKKIGYEWEGVEMEKQRVKWMRYRSKKEREMEKAKLDNQRRRLETERMILMLRRSEIELNELQSSGTRVDPSSAKG

SEQ ID NO: 825 - protein, 540 aa, Oryza sativa
  misc_feature (79)..(79): Xaa can be any naturally occurring amino acid
ARRRRRRRRRRPPSSRSSSSPIEAAAAVVHPAGRRRRASSRRCPASSRPPPPCIQLPPPPRVQPPPPSPSSPPRPAPSXPPPQPLSSPPPPSSSPPPLSRVQAPAAVPLEPAATLLLCFPDAAGEAGENRGQSGGLGVQCETSAQTQLSSKLHPSTASPILVWSIQVPTRPTSPMCRHTVARSMKVLCSACEAAEARVLCCADDAALCARCDLHVHAANRLAGKHHRLPLLSSSSSSSSPSPPTCDICQDAHAYFFCVEDRALLCRACDVAVHTANALVSAHRRFLLTGVHVGLDAAADDDDKHPPHPLSSSLPRNTAPPPQPPPKRSPSPIYSDDDVIDWATGGHDIGITGNLPDWSLVDEQFNTPALPPVVTKTPPKRASRGPVTAGTAAAVFGNLAGGSPDWPLNEFFGFADFSSGFGFAENGTSKADSGKIGSMDGSPNGGRSSSSSSSSSAAAAGGGGGGQDFFGQVPEVHWAVPELPSPPTASGLHWQRDPRYGGGATDASAVFVPDISSPENPFRCFAAAAAGDHTMKRRRRC

SEQ ID NO: 826 - protein, 399 aa, Arabidopsis thaliana
MSKSRDTEIKLFGRTITSLLDVNCYDPSSLSPVHDVSSDPSKEDSSSSSSSCSPTIGPIRVPVKKSEQESNKFKDPYILSDLNEPPKAVSEISSPRSSKNNCDQQSEITTTTTTSTTSGEKSTALKKPDKLIPCPRCESANTKFCYYNNYNVNQPRYFCRNCQRYWTAGGSMRNVPVGSGRRKNKGWPSSNHYLQVTSEDCDNNNSGTILSFGSSESSVTETGKHQSGDTAKISADSVSQENKSYQGFLPPQVMLPNNSSPWPYQWSPTGPNASFYPVPFYWGCTVPIYPTSETSSCLGKRSRDQTEGRINDTNTTITTTRARLVSESLRMNIEASKSAVWSKLPTKPEKKTQGFSLFNGFDTKGNSNRSSLVSETSHSLQANPAAMSRAMNFRESMQQ

SEQ ID NO: 827 - protein, 198 aa, Brassica napus
MATSADPAPTKKSRNSRKALKQKNEIVATETPPSPVSAKAKSAKSFEKDLLEMQTMMEKMKIEKDKTEELLKEKDEILRRKEEELVTRDAEQEKLKTELKKLQKMKEFKPNMTFACGQSLTQAEQEKMNKKKKKKDCPETKRPSSSYILGCKEQREEVKKQNPEADFKETANILGTKWKSLSAEEKKPYEERYKVEKE

SEQ ID NO: 828 - protein, 188 aa, Lupinus hirsutissimus
SGPYPYFPSSSSSYHPFAFFNHENSSSNNTFSHDLLSFPYNIPTTHHYHAPTQETLSNFADCAASTAMFKNDVSGSNFGFSNFMAKKPASKKDRHSKIHTSQGLRDRRVRLSIEIARKFFDLQDMLGFDKASNTLEWLFNKSKKAMKELARSKNSSSGAVANSFSSSDSEFEVVSMINQDSIDATPEG

SEQ ID NO: 829 - protein, 248 aa, Zea mays
GLCLLLLSPSSSPFPCSCFQKGLSPVMGATSPSGLELTMAVPGLSSSSGSEGFVCNNNISNNGGGNMRDLDMNQPASGGEEEDFLMGGVEEDEEERGAGGPHRPKKLRLSKEQSRLLEESFRLNHTLSPKQKEALAIKLKLRPRQVEVWFQNRRARTKLKHTEMECEYLKRCFGSLTEENRRLQREVEELRAMRMAPPTVLSPHTRQPLPASALTMCPRCERVTAATCPRITRPAASPFHPRRPSAAF

SEQ ID NO: 830 - protein, 330 aa, Zea mays
LVPGRMELGLSLGETMADAGSDLVLGLGMGVGVRREEEAQRGRRDREARRELEFETGRCARPSPEPAVRLTLLPGLVPSLGLPWPLSSETNREVPTRGFDDVNRALSVACAGAEEDEAAVAAATAAASSSPNNSSGSFAMDFSAHGQGQGQDQAAPGADRACSRASDEDDGGSARKKLRLSKEQSAFLEESFKERATPNPKQKLALARQLNLRARQVEVWFQNRRARTKLKQTEVDCEHLKRCCETLTGENRRLHKELAELRALKAVRPLLHMHLPATTLSMCPSCERVASTSSAAPAAPAPASPSPAAGAGIAAAPPFHDKENSRPPPP

SEQ ID NO: 831 - protein, 80 aa, Triticum aestivum
MSGSSSRGGDDAAWSAKENKLFEEALAYHGEGTPDRWLKVSRAMGGTKTADEVRRHYEILVDDINLIESGRVPFPKYKDN

SEQ ID NO: 832 - protein, 156 aa, Oryza sativa
MPDLPCDGDGVCMVCRVASPPEVDLLRCSTCATPWHSPCLSKPPALADAAQWSCPDCSGDSTDAPPPAPAPLAPGSAGQLVAAIRAIECDATLSDQEKARRRQELLGGAAPAGADADDDEGDDVLEVIGKNFSCAFCMKLPERPVTVSTLAGPFPH

SEQ ID NO: 833 - protein, 174 aa, Brassica napus
PQGSRGISDDEDGDNSRKKLRLSKDQSAILEETFKDHSTLNPKQKQALAKQLGLRARQVEVWFQNRRARTKLKQTEVDCEFLRRCCENLTEKNRRLQKKVTELRSLKLSPQFYMHMNPPTTLTMCPSCEHVSVPPPPPQVAASGHHQRSLPVNPWAPATRVSHGLTFDAFRPRS

SEQ ID NO: 834 - protein, 232 aa, Triticum aestivum
NGTCCEKYCGCPKMCKNRFRGCHCAKSQSRSRQCPCFAADRECDPDVCRNCWVGCGDGSLGVPSQRGDNYECRNMKLLLKQQQRVLLGRSDVSGWGAFLKNTVSKHEYLGEYTGELISHKEADKRGKIYDRENSSFLFNLNNEFVLDAFRMGDKLKFANHSPDPNCYAKVIMVAGDHRVGIFAKERIGSGEEIFYDYRYEPDRAPVWARKPDAPGAKDPGQPSSGRAKKLAH

SEQ ID NO: 835 - protein, 232 aa, Fragaria x ananassa
MARGKIQIKRIENVTNRQVTYSKRRNGLFKKASELTVLCDAKVSLLMVSSSGKLHEFISPSTTTKQVYDEYQKLLGINLWKSHYETMQENLKKLKETNKILKRQIRQRLGECLNDLRFADLLSLEKEMETAVEVVRLRKEKLIMNQIQTKTKKIRNAAGCNNRLYEFNMDDPHYGLVEDGVEYYDSAVIGYSANEQPHNVFPLRLQPSHHHHPNLHHGGGGGGSDRTTYTLL

SEQ ID NO: 836 - protein, 333 aa, Oryza sativa (japonica cultivar-group)
MSMMSFLSMVEAELPPGFRFHPRDDELICDYLAPKVAGKVGFSGRRPPMVDVDLNKVEPWDLPEVASVGGKEWYFFSLRDRKYATGQRTNRATVSGYWKATGKDRVVARRGALVGMRKTLVFYQGRAPKGRKTEWVMHEYRMEGVHDQQASSFSSKEDWVLCRVICKRKSGGGATSKSRSLTTTTTTIVHDTSTPTSSPPLPPLMDTTLAQLQASMNTSSSSAIAAVAALEQVPCFSSFSNSIASNNNNSNSATVNAQQCYLPIVTGSNNNGMSYLDHGLPEFGSFLDTQSCDKKMLKAVLSQLNSIGGEVLPGLPPPSEMAAAVSSSWMNHF

SEQ ID NO: 837 - protein, 110 aa, Brassica napus
KRGKIYDRENSSFLFNLNDQFVLDAYRKGDKLKFANHSPEPNCYAKVIMVAGDHRVGIFAKERILAGEELFYDYRYEPDRAPAWARKPEASGSKKDENVTPSVGRPKKVA

SEQ ID NO: 838 - protein, 188 aa, Fragaria x ananassa
LLMVSSSGKLHEFISPSTTTKQVYDEYQKLLGINLWKSHYETMQENLKKLKETNKILKRQIRQRLGECLNDLRFADLLSLEKEMETAVEVARLRKEKLIMNQIQTKTKKIRNAAGCNNRLYEFNMDDPHYGLVEDGVEYYDSAVIGYSANEQPHNVFPLRLQPSHHHHPNLHHGGGGGGSDRTTYTLL

SEQ ID NO: 839 - protein, 245 aa, Lolium perenne
MGRGKVQLKRIENKINRQVTFSKRRSGLLKKAHEISVLCDAEVGLIIFSTKGKLYEFATDSCMDKILERYERYSYAEKVLISTESEIQGNWCHEYRKLKAKVETIQRCQKHLMGEDLESLNLKELQQLEQQLESSLKHIRARKNQLMHESISELQKKERSLQEENKILQKELIEKQKAHTQQAQWEQTQPQTSSSSSSFMMGEATPATNCSNPPAAASDRAEDATGQPSARTVLPPWMVSHINNG

SEQ ID NO: 840 - protein, 261 aa, Lolium perenne
MGRGKVQLKRIENKINRQVTFSKRRNGLLKKAHEISVLCDAEVAVVVFSPKGKLYEYATDSSMDKILERYERYSYAEKALISAESESEGNWCHEYRKLKAKIETIQKCHKHLMGEDLECLNLKELQQLEQQLESSLKHIRSRKSHLMMESISELQKKERSLQEENKALQKELVERQKAARQQQQEQWDRQTQTQQAQNQPQAQTSSSSSSFMMRDQQAHAQQNICYPPVTMGGEAVAAAPGQQGQLRIGGLPPWMLSHLNA

SEQ ID NO: 841 - protein, 256 aa, Solanum tuberosum
TPMMCTSLGVIRKGSWTEEEDILLRKCIDKYGEGKWNLVPTRAGLNRCRKSCRLRWLNYLRPHIKRGDFDWDEVDLILRLHKLLGNRWSLIAGRLPGRTANDVKNYWNTNLLRKLNTSTKFAPQPQEGINTSTIAPQPQEGIKCGKANAIIRPQPQKFRSSMKINVSWCNNNSIVNNEEASKDNNDMQWWANILENCNDIGEGEAERTLPSCKEINCNEIDKTPSLLHDGGNSTQQGQGDGGWDEFSLDDIWNLLN

SEQ ID NO: 842 - protein, 279 aa, Lolium perenne
MGRGPVQLRRIENKINRQVTFSKRRSGLLKKAHEISVLCDAEVALIVFSTKGKLYEYSSQDSNMDVILERYQRYSFEERAIVDQNIGGQANWGDEFGSLKIKLDALQKSQRQLLGEQLDPLTTKELQQLEQQLDSSLKHIRSRKNQLLFESISELQKKEKSLKDQNGVLQKHLVETEKEKSNVLSNIHHREQTNGAANIHRREQMNETTHIHNQEQLNGATTSSPSPTPVAVLDSVATLNIGSSQSREAAGEEPESQPSPAQANSGKLPPWMLRTISNR

SEQ ID NO: 843 - protein, 259 aa, Solanum tuberosum
KGSWTEQEDFLLRKCIQIYGEGKWHLVPARAGLNRCRKSCRLRWLNYLRPHIKRGDFAPDEVDLILRLHKLLGNRWSLIAGRLPGRTANDVKNYWNTHFQKKLNIITPPPRPRPNPHLHIKHKSIVVTKNEIIRPQPRNFSNVKKNNSHWCNNKSMITNTLDKDDKRCKEIVVNISEKPTRENTSSIDDGVQWWTNLLENCNEIEEEVAVTNFEKTPTMLLHEEISPPLINGEGNSMQQGQSHDWDDFSTDIDLWNLLN

SEQ ID NO: 844 - protein, 275 aa, Zea mays
MDLNECERRGPAGPDPLSRQGSIYSLTFDEFQNTLGGMGGGLGKDFGSMNMDELLRSIWTAEESQAMASASASASASVSALGAAVDGGAALQRQGSLALPRTLSVKTVDEVWRDFVREAPPGTAGGEEPQPNRQPTLGEMTLEEFLVRAGVVRDNPAAGSCCCPCAAGCSTADSGGGAVTVSPVDTSVAQLDSMGKSDEDLSSPMAPVPYPFEGVIRGRRSGAGVEKVVERRQRRMIKNRESAARSRARKQAYTMELEAEVQKLKEQNAELQKKQ

SEQ ID NO: 845 - protein, 499 aa, Lotus japonicus
MEMDIDCIHHLDFSGHSTLTNTPSSDNDNYGCSWNHWSPVVNWDAFTGNQDDFHHLIDSMIDDNNTGPAFSDHTASTTSEEEEEEEATTTTMTTTTTTTTTTPEAADDDFKGLRLVHLLMAGAEALTGANKNRELARVILVRLKELVSHTDGTNMERLAAYFTEALQGLLEGAGGAYNSSSKHHVIGGPHHEPQNDALAAFQLLQDMSPYVKFGHFTANQAIVEAVAHERRVHIVDYDIMEGVQWASLMQALASNPNGPHLRITALSRSGVGRRSMATVQETGRRLTAFATSLGQPFSFHHSRLESDETFRPAGLKLVRGEALVFNCMLNLPHLTYRSPNSVASFLTAAKALRPRLVTVVEEEVGSALGGFVERFMDSLHHFSAVFDSLEAGFPMQGRARALVERVFLGPRIVGSLARIYRTGGGGEERGSWREWLRAAGFSGVAVSSANHCQSNLLLGLFNDGYRVEELGSNKLVLHWKTRRLLSASLWTCSSESDCA

SEQ ID NO: 846 - protein, 325 aa, Brassica rapa subsp. pekinensis
MGRSPSSGDSRLKKGPWTPDEDEKLVKYVKKHGHSSWSALPKLAGLNRCGKSCRLRWTNYLRPDIKRGKSLRRREQTILNLHAVVGNKWSTIANNLPGRTDNEIKNFWNTHLKKKLIQMGVDPMTHRPRTDVLSSLSQLISLSSNLRGFVDQEQIMLKLQTEMAKLELFQYLLQPPSMYNNINPNDFDTRSLLSSIASTTNNNLNLGSYLQDFNSLPSLKTLNTNIGPSSVFPQNLDDNHFKFFNQRENLPVSPIWLSDPSSSNQSFLPSLDPSYSMADDLIRNQYVIEDVNSNLTSSSCQESGASVSAAWPDHLLDDSIFSHIP

SEQ ID NO: 847 - protein, 328 aa, Arabidopsis thaliana
MPTLYKKAGFMGERDDGLGLSLSLGNSQQKEPSLRLNLMPLTTSSSSSSFQHMHNQNNNSHPQKIHNISWTHLFQSSGIKRTTAERNSDAGSFLRGFNVNRAQSSVAVVDLEEEAAVVSSPNSAVSSLSGNKRDLAVARGGDENEAERASCSRGGGSGGSDDEDGGNGDGSRKKLRLSKDQALVLEETFKEHSTLNPKQKLALAKQLNLRARQVEVWFQNRRARTKLKQTEVDCEYLKRCCDNLTEENRRLQKEVSELRALKLSPHLYMHMTPPTTLTMCPSCERVSSSAATVTAAPSTTTTPTVVGRPSPQRLTPWTAISLQQKSGR

SEQ ID NO: 848 - protein, 285 aa, Zea mays
MAGQPPPQGPEDDFFDQFFSMTAGGSYPGATAGGGRAPGDQPFSLALSLDAAAAEASGSGKHADGGKADREAIQLPGLFPPVFGGGVQPPHLRATPPTQVFHAQQPKQGGAAVGPQPPAPRPKVRARRGQATDPHSIAERLRRERIAERMRALQELVPNTNKTDRAVMLDEILDYVKFLRLQVKVLSMSRLGGAGAVAQLVADIPLSVKGEASDSGSKQQIWEKWSTDGTERQIAKLMEEDIGAAMQFLQSKALCMMPISLAMAIYDTQHSQDGQPVKPEPNTPS

SEQ ID NO: 849 - protein, 74 aa, Fragaria x ananassa
MARGKIQIKRIENVTNRQVTYSKRRNGLFKKASELTVLCDAKVSLLMVSSSGKLHEFISPSTTTKQVYDEYQKL

SEQ ID NO: 850 - protein, 362 aa, Ostreococcus tauri
MDPPGPDDPATARASASDELFVFDDTAQRLVAEQKPWTRDPHYFKKYVDERVDALISFARPECDAHASVKISALALMKMTQHCERGGEIEVMGTLLGQTRGDAFVVTDAFELPVEGTETRVNAQAEAYEYMVEHVGAMKRTGRGENVVGWYHSHPGYGCWLSGIDVNTQMLNQRYNEPFMAIVIDPTRTCAQGKVEIGAFRTFPDGYAPPDEASTSKQQTIPLSKVEDFGVHANKYYSLDVSFFKSSLDARSLNPLKEQYWVNPLSSAPFLNNRRLVAGQVWDIQSKIASAEQALKRGGPTGAMPRAAADAPESPIAAATRDAVALAVEQSKGFTAHAVKSALFDAARAVDAIKSLDQMQID

SEQ ID NO: 851 - protein, 220 aa, Arabidopsis thaliana
MNNQNVDDHNLLLISQLYPNVYTPLVPQQGGEAKPTRRRKRKSKSVVVAEEGENEGNGWFRKRKLSDEQVRMLEISFEDDHKLESERKDRLASELGLDPRQVAVWFQNRRARWKNKRVEDEYTKLKNAYETTVVEKCRLDSEVIHLKEQLYEAEREIQRLAKRVEGTLSNSPISSSVTIEANHTTPFFGDYDIGFDGEADENLLYSPDYIDGLDWMSQFM

SEQ ID NO: 852 - protein, 300 aa, Arabidopsis thaliana
MGAPKQKWTQEEESALKSGVIKHGPGKWRTILKDPEFSGVLYLRSNVDLKDKWRNMSVMANGWGSREKSRLAVKRTFSLPKQEENSLALTNSLQSDEENVDATSGLQVSSNPPPRRPNVRLDSLIMEAIATLKEPGGCNKTTIGAYIEDQYHAPPDFKRLLSTKLKYLTSCGKLVKVKRKYRIPNSTSLSSHRRKGLGVFGGKQRTSSLPSPKTDIDEVNFQTRSQIDTEIARMKSMNVHEAAAVAAQAVAEAEAAMAEAEEAAKEAEAAEAEAEVAQAFAEEASKTLKGRNICKMMIRA

SEQ ID NO: 853 - protein, 955 aa, Zea mays
MAGEQAPEGSGTSRRMDLNLYLGLPPLPRPPVWLGTAMIAPTLMPNSTAPEAPRTGEPDESLAPAAAAYSPSNALSTPEEQPMLDPIVYSWLDGNSTDGEEHTDASEPGPVDGVNVPRSQLLVAATGLEGDDIPVVRFLRPSQVAAGGMEMVSTSILRRSNQGAAAIESGTPELRFQRVIQISQQHSIVRPASANHSQGAASTDADRLVWAIQRTHNSYEAARRQKLDGDNKVCGNSAAKKDGSCDCNSSFECNICLDPAKEPVVTPCGHLFCWPCLYQWLHAHSLHSECPVCKGEVLEVNVTPIYGRGGEEGDSTNPDLPPRPRANRRESLSQQLQMADTRGIATVVRQLIQNQGIVRGLPSSTGIEMTVVTTGRQRARARRPQRQDNNASPSIHVAAQNMGNVASESSNQIQLPHSNGDNAAQMVLASPQQSSSVEQLSTSSTTALIVDGRPVTVKKLKIGNGQGECEFKVEDVGATPVQQFVTSVTKPVTCLLPYPCIQKRRTKQLPSDFVPRWSSRIAKRGNKTLDIASRQIQADLGRRLGISVDSEAFSQEALDEYGRLFTKPLYQSHIPALAALFGWSVPDEVDAALEVLVVSGDITRRTCTNLPLLPVVFSIVFPMDLSKILIWNLRGLNKKARHDAVRVMIDSTCPDLEFTQGRRRFVFENFWPKLPGFMDEVERSWFIPLDMQCPFQCFADKLKRLAGHLQSWSQKKTGNVKQQILYAKEILHLLEMARDIRALSWHEEWLRHRIKHHSLALASWEGTMACVKSGLCWLKHGDSNTSYFHHHARYRKKNNFITRLQVGDRLLFEQEKKEAVWDFYNSLLGTAGSRDVTLKLDTFHQLGMDLAELEQVITEHEVWTIILSLPSDKAPGPDGYTSRFYKAAWQVIRIDFMAAVSRLMQGDVSRFHLLNSVYVALLPKKAEALEVKDFQPLSLIHSFAKVITKLLANRL

SEQ ID NO: 854 - protein, 263 aa, Triticum aestivum
MAPSSPPAAAVASEGDEQQQQIVVAAAAAAAAKKGGGKRGRREMRRIEDATSRQVTFSKRRSGLLKKALELGVLCDAEVALIVFSPRGRLYEYASAPDLQKTIDRYLNHTKGTSTNEKTVEQPAAGVQMCRSEATALKHKIDAIEAYQRKLSGEGLGSCPAHELQELELQLEKSLSCIRQKKQQKMLDKILELKEKERKLLTENSVLREEYKALPLLELATAAAAAERSPDGAGAEEAEEDERRRHYMEVETELVIGRPGSSS

SEQ ID NO: 855 - protein, 231 aa, Momordica charantia
MSDSPQRKMGRGKIEIKRIENTTNRQVTFCKRRNGLLKKAYELSVLCDAEVALIVFSSRGRLYEYANNSVKATIDRYKKASSDSSNTGSTSEANTQFYQQEAAKLRVQIGNLQNSNRNMLGESLSSLSVKDLKSLESKLEKGISRIRSKKNELLFAEIEYMRKREIDLHNNNQLLRAKIAESERNASMIGGDFELMQSHPYDPRDFFQVNGLQHNNNHQYPRQDNMALQLV

SEQ ID NO: 856 - protein, 312 aa, Zea mays
MGCRSCDKPKMNYRKGLWSPEEDQRLRDYILKHGLGCWSAVPAKAGLQRNGKSCRLRWINYLRPGLKRGMFSQEEEDVVIDLQAKLGNKWSQIAMHLPGRTDNEVKNYWNSYLKKRVMQQAQGASSNSSPKSPPELTSMSTTADLSSMSMPMPMPMPMHQRHHVKNNSGGGSTATSHGQQDDANISGSHAALSAPPPPPLAQQPFEHQAARSFVFSDWAPESYSLSTHWPAATSTSGNVTPSHGSTAAAAAAAFGDQMSGTYGAGGLPPQHQDHHHSTAPATGIAGSGYFDLLNMGDIYGGFSSTNNDDLLF

SEQ ID NO: 857 - protein, 374 aa, Oryza sativa (indica cultivar-group)
MAFGQDTIEQLYRELAGGRRLSAKLQALLEGPLDSRGQKEAVDVSRELGRVFMVSLYMLKPCSNSSRRPEGVTRTAPETRTDDSICLHTPARVKRVRSEEVLVRNGREEVVTRTEIITPSPYKDGYQWRKYGQKNIQDSNYLRLYFKCTFSRERSCAAKKQVQQRDAGEPPMFLVTYLNEHTCQQPQAVPGTPNTAGSSPTTTSRQRQSSSSPPAEMLDLTMNGAGLFSRLLLPHAVGGGGSAAEEEAAIVTCLAAVISGGAAAAPPPLIWPTSAPEAAFVASAAGHSPSAADESVADEAAAAQMADMDYCFGQYDQSTFGAAAAADHRVLIGDDGDVQRIVAARIADTVWPRYTRDTSAWETAGTSSMRGSID

SEQ ID NO: 858 - protein, 296 aa, Oryza sativa
  misc_feature (168)..(168): Xaa can be any naturally occurring amino acid
  misc_feature (205)..(205): Xaa can be any naturally occurring amino acid
  misc_feature (220)..(220): Xaa can be any naturally occurring amino acid
  misc_feature (233)..(233): Xaa can be any naturally occurring amino acid
  misc_feature (254)..(254): Xaa can be any naturally occurring amino acid
  misc_feature (271)..(271): Xaa can be any naturally occurring amino acid
MEVGGRKRGKPDGANGAGGKRARESESFQTGVGSKSKPCTKFFSTSGCPFGEGCHFLHHFPGGYQAVAKMTNLGGPAIAPPPGRMPMGNAVPDGPPTPTVKTRLCNKYNTAEGCKWGDKCHFAHGERELGKPMLMDSSMPPPMGPRPTGHFAPPPMASPAMSTPAQLXGLSATGKISVDASLAGGIIGRGGVNTKEISRVTGGSXGHRDIIRTTLNLCLXGLVTMNASAVRRXSIGGPQANWGPGERKHTSGSXRGPGSNFKTKLCENFTXKGSCTFGDRCHFAHGENELRKSAAA

SEQ ID NO: 859 - protein, 241 aa, Petunia x hybrida
MGRGRVELKRIENKINRQVTFAKRRNGLLKKAYELSVLCDAEVALIIFSNRGKLYEFCSSSSMLKTLERYQKCNYGAPETNISTREALEISSQQEYLKLKARYEALQRSQRNLLGEDLGPLNSKELESLERQLDMSLKQIRSTRTQLMLDQLQDLQRKEHALNEANRTLKQRLMEGSTLNLQWQQNAQDVGYGRQATQTQGDGFFHPLECEPTLQIGYQNDPITVGGAGPSVNNYMAGWLP

SEQ ID NO: 860 - protein, 670 aa, Gibberella zeae PH-1
MMTETQRHNEIQSHRVPDPTWQPRLSLFVLSPSIKRQRHPLISAPYPQTFFPSLVFFPQYLPSTATIPPTTRKRKAAEATITSANRDEVPNKRVIASAALSDKHALPPTPITTVSNPMDSDEEYMSALSTDDEIMQDDSGDEISAGDGTTFDTPDTPSYPIMTVTNHRDITDFDDEEFDEPDPDFGLAKDVEKKKRAAHVVSYKVYEPSDIQSQQDEMIGEVNMILDMQKEDAAILLRHFRWNKERLLEDYMDRPEKVMEAAGLSSTTSSSPKLEVIPGFVCDICCEDDDGLESFAMKCGHRYCVDCYRHYLTQKIREEGEAARIQCPSDGCGRILDSASLDVLVTPALAGRYQELLNRTYVEDKDNFKWCPAPDCPNALECGVKKKDLGRIVPTVECRCGFRFCFGCPNPDHQPAPCDLVKKWLKKCADDSETANWISANTKECPKCNSTIEKNGGCNHMTCRKCKYEFCWMCMGLWSEHGTSWYNCNRYEEKSGSEARDAQAKSRTSLERYLHYYNRYANHEQSAKLDKDIAQKTEKKMVQLQSASGMSWIEVQYLNSASQALQTCRQTLKWTYAFAFYLARNNLTEIFEDNQKDLEMAVENLSEMFEKPITELSDPKLKVDIMDKTSYCNKRRVILLEDTAENLANGEWNFNADLLAATTSAPVHRR

SEQ ID NO: 861 - protein, 374 aa, Ustilago maydis 521
MTPNKRSRASSIASNDGATAIATAAAAAVPSSSHAASTLPASGPLVHASQDLDDFQASFWRYQMDLVEQGGDADGNIVDFKSGLPTQGQLPLARIKKVMKSDDQVKMISAEAPILFARACEIFISDLTCRAFLIAEEHKRRTIQRSDVTGAIGRSDLFDFLIDIVPRHESVPSSRLPGGGAARREKTGEGRGLGRSNADASASTKQQQNQAVSYDNHLLHSMAGAYDDAEASSSTTAALTEEGGAGSSSQSYNIPHTSNANVNVGHTPMSHWIHDNSADQHSSQPDDHHATHSHHHAASSIHASHPGGASAAHDHQQPHHHAHHHHLAQHAGSHHSHHHSPLDYVTSSSNAGTPNSIGAGSATGGAWPHTFSGF

SEQ ID NO: 862 - protein, 285 aa, Zea mays
MGAPKQKWTSEEEDALRRGVRKHGAGKWRTIQKDPQFSPILSSRSNIDLKDKWRNLSFSASGLGSSKVRVPKITGSSSSPSSSSQALLLPAANNVTEAMLPADADKKPRDGKTPPKYGAMIMEALSELNQPNGSDIDAIFDFIKQRHVVQSTFRRFLPSKLRRLADSNKIEKVDNFYRLPDSFATRTPAQIKVSDPKQKDPSKASKTIGLFAASSPALEAAMAAAVKVTDAEAKAHDAHDQMMEAERMLKMAEDTESILTIAAEIYDRCSRGEITTLVPVAQREF

SEQ ID NO: 863 - protein, 229 aa, Triticum aestivum
MGATEDSSSGSETTTSSSVEALASPPSPTATTASSKKKRPRNDGRHPTYRGVRMRSWGKWVSEIREPRKKSRIWLGTFATAEMAARAHDVAALAIKGRAAHLNFPDLAHELPRPATAAPKDVQAAAALAASADFPASATAAANAGAKNPDGPEHSGASASASASASASASPPPDTAEDALFDLPDLLFDLRHGPPSCQLSCASSWDDDVAFAGPGAGVFRLEEPLQWEY

SEQ ID NO: 864 - protein, 317 aa, Zea mays
  misc_feature (172)..(172): Xaa can be any naturally occurring amino acid
MAMAMASMPPACAATELVAKGRESAAVLKAILGQLPAAATPHDGLRDLAEQVLRCCDRALAALLRGAATEEAACSSSARKRRKQPAERQGGLAPPPPSPAATGSKRMRMSRGERGTRAEKKETMEDGFIWRKYGQKDIHGSNYPRLYFRCTYKDDRGCEARRQVQRSDTEPXAAYLITYFGEHTCCCRDDAVEAPAPFVIDFGLSAAACDDGLQLPQYGSPWPSCDDDGPGPVELQTPPPRTSADLCSSPPEEELRAGACDVAEFVAEQSTTVTAELMGRMTSPEWDGCLDWELGEGDSSLDVDGFDRYYFDYSDLL

SEQ ID NO: 865 - protein, 95 aa, Brassica napus
VDCEYLKRCVEKLTEENRRLQKEAMELRTLKLSPQFYGQMTPPTTLIMCPSCERVAGPSSNHQHNHRPVPVNPWVACAAGQVAHGLNFEALRPRS

SEQ ID NO: 866 - protein, 282 aa, Arabidopsis thaliana
MMMGKEDLGLSLSLGFAQNHPLQLNLKPTSSPMSNLQMFPWNQTLVSSSDQQKQQFLRKIDVNSLPTTVDLEEEIGVSSPNSTISSTVSGKRRSTEREGTSGGGCGDDLDITLDRSSSRGTSDEEEDYGGETCRKKLRLSKDQSAVLEDTFKEHNTLNPKQKLALAKKLGLTARQVEVWFQNRRARTKLKQTEVDCEYLKRCVEKLTEENRRLEKEAAELRALKLSPRLYGQMSPPTTLLMCPSCERVAGPSSSNHNQRSVSLSPWLQMAHGSTFDVMRPRS

SEQ ID NO: 867 - protein, 210 aa, Gerbera hybrid cv. 'Terra Regina'
MGRGKVQLKRIENKINRQVTFSKRRGGLLKKAHEISVLCDAEVALIVFSAKGKLFEYSTDSCMENILDRYEQYSNIDRQHVAVDTDSPIRWTQECNKLKSRAELLQRNLRHYMGEDIESLGLREIQNLEQQLDTALKRIHSKKNQLLHQSISELQKKEKAIQEQNNTLIKNIKEKEKTITQKAQWEPHNYGPNTTPLLFSLPPHSSLNIG

SEQ ID NO: 868 - protein, 155 aa, Oryza sativa (japonica cultivar-group)
MGLMGFPLLSQDKSGLLLPLPAAAASASAAQMGGKCPHRKVKKRRLSHKTARRGKFLVKADDAVYDELVKLADAGKDADATQLPVDEDLPGMGQFYCLHCDRYFASESVKEEHYRSKRHKKRIKQMSGPAPHTQLDAELAAGMGMPDNGLKLMSM

SEQ ID NO: 869 - protein, 199 aa, Thalictrum thalictroides
AGILKKANELNVLCDAQVAMIMFSSSDKLTEFVSPNTTMKKAFDMYQLASGCNLWDSRYEKMQEALKKQNEINRKLRREIGRRVGGEDLSDMSFEELCGLEQHLHSSVKIVAQRKYSQLTTQTETSKKKVKNLEQMHNDLLHEYEEKLEEPYALVDHEGLSALEMAANGASHIFSFRLQPSQPNLHGDGGFGFEDLRLG

SEQ ID NO: 870 - protein, 551 aa, Saccharomyces cerevisiae
MSSGTENDQFYSFDESDSSSIELYESHNTSEFTIHGLVFPKLISVTSQDSEFDINEDEDGVDTIYEGMLDAPLTKNNKRILCEGSVPNLSYECLTTKGIFERMLQRVDHLQPIFAIPSADILILLQHYDWNEERLLEVWTEKMDELLVELGLSTTANIKKDNDYNSHFREVEFKNDFTCIICCDKKDTETFALECGHEYCINCYRHYIKDKLHEGNIITCMDCSLALKNEDIDKVMGHPSSSKLMDSSIKSFVQKHNRNYKWCPFADCKSIVHLRDTSSLPEYTRLHYSPFVKCNSFHRFCFNCGFEVHSPADCKITTAWVKKARKESEILNWVLSHTKECPKCSVNIEKNGGCNHMVCSSCKYEFCWICEGPWAPHGKNFFQCTMYKNNEDNKSKNPQDANKTLKKYTFYYRLFNEHEVSAKLDWNLGQTLGTKVHALQERIGISWIDGQFLSESLKVLNEGRTVLKWSFAVAYYSDASHNLTKIFVDNQMLLANAVESLSELLQIKTPEVIMKRRPEFYNKAGYVENRTTALMECGRELLCKGICKAAE

SEQ ID NO: 871 - protein, 436 aa, Arabidopsis thaliana
MGEELADTMNLDLNLGPGPESDLQPAPNETVNLADWTNDPPERSSEAVTRIRTRHRTRFRQLNLPIPVLSETHTMAIELNQLMGNSVNRAAMQTGEGSERGNEDLKMCENGDGALGDGVLDKKADVEKSSGSDGNFFDCNICLDLSKEPVLTCCGHLYCWPCLYQWLQISDAKECPVCKGEVTSKTVTPIYGRGNHKREIEESLDTKVPMRPHARRIESLRNTIQRSPFTIPMEEMIRRIQNRFDRDSTPVPDFSNREASERVNDRANSILNRLMTSRGVRSEQNQASAAAAAIVAASEDIDLNPNIAPDLEGESNTRFHPLLIRRQLQSHRVARISTFTSALSSAERLVDAYFRTHPLGRNHQEQNHHAPVVVDDRDSFSSIAAVINSESQVDTAVEIDSMALSTSSSRRRNENGSRVSDVDSADSRPPRRRRFT

SEQ ID NO: 872 - protein, 178 aa, Arabidopsis thaliana
MGRRKIKMEKVQDTNTKQVTFSKRRLGLFKKASELATLCNAEVGIVVFSPGNKPYSFGKPNFDVIAERFKNEFEEEEEGDSCETSGYSRGNRARQEKKICKRLNSITEEAEAEKKHGEDLHKWLESAEQDKFNKPIEELTLEELKEFEAKIKKISCGIQSNISHMQASSSLMFLSNDN

SEQ ID NO: 873 - protein, 240 aa, Zea mays
  misc_feature (239)..(239): Xaa can be any naturally occurring amino acid
MSLPPTDGGDDWFLDCGILEDLPAAACGAFPWDASVSSSNPSAEVGSHVNKLDLPKDSGSNKRLRSEPCGRPTSKACREKVRRDKLNDRFLELGTTLDPGKPVKADKAAILSDATRMVTQLRAEAQQLKDSNGSLEDKIKELKAEKDELRDEKQKLKLEKETLEHQMKLLTATPAYMPHPTMMPSPFAQAPMAPFHAQGQALGQKLMMPFVGYPGYPMWQLMPASEVDTSKDSEACPPXA

SEQ ID NO: 874 - protein, 297 aa, Oryza sativa (japonica cultivar-group)
MGAPKQRWTAEEEAALKAGVAKHGTGKWRTILRDPEFTALLRLRSNVDLKDKWRNLSVTAGGYGSRERARVALKGGKRGPKALAEPMDADEKNPDIDDNAIIDAQPLAVVVEPMQLESTPEKEKSVARLDDLILEAIKKLKEPSGSNRTTISSYIEEQYWPPEDFQRLLSTKLKALVATGKLIKVNQKYRIAPSSNSSGGKSIKVYSTGEMNIENNNVRQLSKPQVDAELDKMKSMSKEEAASFAARAVAEAEAAIAEAEEAARAAEAAEAEADAAKAFLDAVVTTMQNRNHASAVY

SEQ ID NO: 875 - protein, 157 aa, Oryza sativa (japonica cultivar-group)
MTPLINKLVAELCVNLETFFLFCNEDNMRSYMDGGGAAAYEEEEEEVEDDDGGGGGGGGGGGGGLGEKKRRLAAEQVRALERSFEADNKLDPERKARIARDLRLHPRQVAVWFQNRRARWKTKQIERDFAALRSRHDALRLEAQASRDIYLEEGDSD

SEQ ID NO: 876 - protein, 314 aa, Medicago truncatula
MDFGGNMFCLNNRDQSNTNNNGNSNGFTWCSSGSTTTGTAWNMNTFNVNEVNNSVSAANRTEAGLANALMYLPQNEGGGRQYQSAYGGGVSRGHMMPDPHLTCLKLGKRHYFEDVSGGGGVMGEKKGKGGYCGGGKTAAVGGYTAVTRCQVDGCNVALMNAKEYHRRHKVCEMHSKAPKVVVLGLEQRFCQQCSRFHVVSEFDDSKRSCRRRLAGHNERRRKSSHDSVGRNSSQGGCALSLLSSRTDSWLSPADLSVRCSAALSELIAENRASIMARQYVSDRDWHLQHHAVEDYKEIQSESNYFPQHMFPQTH

SEQ ID NO: 877 - protein, 326 aa, Arabidopsis thaliana
MKRYSTKHFKRILIANNVNIDIDLKTGIVAKNMAKKEKIEQVISMGGIMWEGLNSSLIKVDEALLKQQIREFEKGNDKEWFIITERNKVDQGLSQTKRVGNGAKRQKRVDTNGGYWHATVAAQKINAGDGVVGNKRPLAYYDRKPSEDVKTDWLMQEYSLDHNNDKVRLHFVQDLSYSTSNKEVGEEKKKQKKGEPVEASEGQQPCNAEYHQPLAPLDSCQPQPHDLAEQLDLHQPEQLQLQQPHDIVYQPQYCLLPEQHQLQPFPDNFSELNSFQQQPVMIPDDLEDFLAELMEPHSLDGDEESNNYGFFEGLFDTEGINDKTLH

SEQ ID NO: 878 - protein, 252 aa, Arabidopsis thaliana
MEGIQHPIPRTVEEVFSDFRGRRAGLIKALSTDVQKFYHQCDPEKENLCLYGLPNETWEVNLPVEEVPPELPEPALGINFARDGMQEKDWISLVAVHSDSWLISVAFYFGARFGFGKNERKRLFQMINDLPTIFEVVTGNAKQSKDQSANHNSSRSKSSGGKPRHSESHTKASKMSPPPRKEDESGDEDEDDEQGAVCGACGDNYGGDEFWICCDACEKWFHGKCVKITPAKAEHIKHYKCPSCTTSKKMKA

SEQ ID NO: 879 - protein, 478 aa, Parthenocissus himalayana
  misc_feature (210)..(226): Xaa can be any naturally occurring amino acid
GLSHLASETVHYNPSDLSNWLESMLSEFNPSPNCPLDNPFLPHISQSSAIPPLDYTNCSTQPKQEPSLFDSPSLDYDLKAIPGKALYSHIEQPPQQPPAPPLYQRENKRLKPTTSATTTANSVSSVTGGWGVPTESARPVVLVDSQETGIRLVHTLMACAEAVQQENLKLAEALVKQIGFLAVSQAGAMRKVATYFAEGLARRIYRLYPXXXXXXXXXXXXXXXXXETCPYLKFAHFTANQAILEAFDGKKRVHVIDFSMKQGMQWPALMQALALRPGGPPSFRLTGIGPPSTDNTDHLHEVGWKLAQLAETIHVEFEYRGFVANSLADLDASMLELRDGESVAVNSVFELHSLLARPGGIERVLSAVKDMKPDIVTIVEQEANHNGPVFLDRFTESLHYYSTLFDSLEGCGVSPVNTQDKLMSEVYLGQQICNVVACEGPERGERHETLAQWRARLGSAGFDPVNLGSNAFKQASML

SEQ ID NO: 880 - protein, 251 aa, Zea mays
MGRGPVQLRRIENKINRQVTFSKRRNGLLKKAHEISVLCDAEVALIVFSTKGKLYEYSSHSSMEGILERYQRYSFEERAVLNPSIEDQANWGDEYVRLKSKLDALQKSQRQLLGEQLSSLTIKELQQLEQQLDSSLKHIRSRKNQLMFDSISALQKKEKALTDQNGVLQKFMEAEKEKNKALMNAQLREQQNGASTSSPSLSPPIVPDSMPTLNIGPCQPRGGAESESEPSPAPAQANRGNLPPWMLRTVK

SEQ ID NO: 881 - protein, 88 aa, Triticum aestivum
MSSGSSSRSTSPSSDSEWSKKENKMFEEALAYYGVSAPNLWEKVASAMGGTKSAEEVRRHFQILVDDVNSIEHGRIPFPKYKTQGFWT

SEQ ID NO: 882 - protein, 207 aa, Elaeis guineensis
MGRGRVELKRIENKINRQVTFAKRRNGLLKKAYELSVLCDAEVALIIFSNRGKLYEFCSSSSMMKTLERYQKCNYGAPETNIISRETQSSQQEYLKLKARAEALQRSQRNLLGEDLGPLSSKELEQLEGQLDASLKQIRSTRTQYMLDQLADLQRKEQMLCEANKSLRRRLEESNQAGQQQVWDPTAHAVGYGGSHLNHRAMDSTNR

SEQ ID NO: 883 - protein, 263 aa, Physcomitrella patens
MHVRNDSSGSSLVAMLASCSPAAAVQAQPGGGGMEDTVSCGQKRPYYSTIEASGEDPGEEDVGDDCIQQSKKRRLTFDQVRSHEKNFEIENKLEPERKMQLANELGLQPRQVAVWFQNRRARWKTKQLERDYEVLTLDYNRLKSEFEAVLQEKQELQDEMECLTEKIQTAIPNSADPILEKRKRIISMSQPSSLKTFEGPVKSERIAAEANGRNDALTPCKEEGSKEEGSKETSSDSISQVKYLTRTAFVLWIAARFSHCPIV

SEQ ID NO: 884 - protein, 209 aa, Elaeis guineensis
  misc_feature (136)..(136): Xaa can be any naturally occurring amino acid
  misc_feature (190)..(190): Xaa can be any naturally occurring amino acid
MVRGKTQVRRIENATSRQVTFSKRRNGLLKKAFELSVLCDAEVALIVFSPRGKLYEFSSSSSSMEKTIDRYIMHAKDVNINKKSREHNAQQLKSDAASLMKKIERLEASKRKLLGENLESCAIEELHDLELQLEQXLSSIRNRKYQMLEEQICRLKEKEKILTASIQEKLNAEPRLQLCAPAVSDDYDSXNTDVETELVIGRPGTCKVK

SEQ ID NO: 885 - protein, 504 aa, Parthenocissus quinquefolia
  misc_feature (233)..(246): Xaa can be any naturally occurring amino acid
SDMAEVAQKLEQLEEVIVNAQEDGLSHLASETVHYNPSDLSNWLESMLSEFNPAPNCPLDNPFLPHISQSSAISPLDYTNCSTQPKQEPSLFDSPSLDYDLKAIPGKALYSHIEQPPQQPPAPPLYQRENKRLKPTTSATTTANSVSSVTGGWGVPTESARPVVLVDSQETGIRLVHTLMACAEAVQQENLKLAEALVKQIGFLAVSQAGAMRKVATYFAEGLARRIYRLYPXXXXXXXXXXXXXXHFYETCPYLKFAHFTANQAILEAFDGKKRVHVIDFSMKQGMQWPALMQALALRPGGPPSFRLTGIGPPSTDNTDHLHEVGWKLAQLAETIHVEFEYRGFVANSLADLDASMLELRDGESVAVNSVFELHSLLARPGGIERVLSAVKDMKPDIVTIVEQEANHNGPVFLDRFTESLHYYSTLFDSLEGCGVSPVNTQDKLMSEVYLGQQICNVVACEGPERVERHETLAQWRARLGSAGFDPVNLGSNAFKQASMLLAL

SEQ ID NO: 886 - protein, 349 aa, Triticum aestivum
  misc_feature (204)..(204): Xaa can be any naturally occurring amino acid
MASSGGGRSPATAVLDDLVDVRDRVAMLQTVLQESSPEATLEAGELVDGMMAKLSSALSAVLSTGDGGVASSSGTGRRLGGRRKRSGTASSGPHRRSSSRRRMKSPLIKTVTATTLTDGKSWRKYGQKQINDSTNPRSYYRCTHLPDQGCKAKRHVHVSESNPSEYTIDYYGQHTCKDPSTFPSLIVQGAADAAPPPDCANLIXSFAPINGANRAFTTSTSTSAFSHHLMKEAADHHPVLFSRFSNHSSSPPAQEGVSSDSPSPACHSKYMQYAGGQFINVTGIRTSPLTVGSAPAEYWPVVEVTGVDSAVAGMDSFPSSPSSLGFMSGSLEGSFGNNVYDDDLFSFDS

SEQ ID NO: 887 - protein, 204 aa, Brassica napus
  misc_feature (108)..(108): Xaa can be any naturally occurring amino acid
  misc_feature (125)..(125): Xaa can be any naturally occurring amino acid
  misc_feature (147)..(147): Xaa can be any naturally occurring amino acid
  misc_feature (160)..(160): Xaa can be any naturally occurring amino acid
  misc_feature (167)..(167): Xaa can be any naturally occurring amino acid
  misc_feature (175)..(175): Xaa can be any naturally occurring amino acid
  misc_feature (179)..(179): Xaa can be any naturally occurring amino acid
  misc_feature (183)..(183): Xaa can be any naturally occurring amino acid
  misc_feature (191)..(191): Xaa can be any naturally occurring amino acid
  misc_feature (196)..(196): Xaa can be any naturally occurring amino acid
MGPMIRTEEQEEDYMSPPWLMPMLRGSYFVPCLIHADSNKNECNLFCLDCAGNAFCSYCLVKHKDHRVVQIRRSSYHNVVRVNEIQKYIDISCVQTYIINSAKIVFPXERPQPRIGKGVTNTCEXICCRSLLDSFRFCSLGCKLGGXWKRGDQSLTFSLXGKHGREXPRGGRESXEAPXPTKXRKTKAFTXPRGGXSLSRLGSM

SEQ ID NO: 888 - protein, 272 aa, Physcomitrella patens
QVQCGNFLARQCWGSPGYSGIILRQQPDLSEVQGVFNPSTARLDMASNVGRRGYSRGGSNVVPVRNDSSTDTLVAMLASCSPVALQVQRTGGSLEDAVVSCGQKRSFFPLFEASREDAGDEDLGDDCTHNVEKKRRLTFDQVRSLELNFEVENKLEPERKMQLAKELGLQPRQVAVWFQNRRARWKTKQLERDYEVLTLDYNRLKSEFEAVLQEKQELQGEMECLTGRLQTSPQLASGDGVSEKPSKKSSKAVASQLSLQKMVSEECVEVRE

SEQ ID NO: 889 - protein, 497 aa, Parthenocissus quinquefolia
EVAQKLEQLEEVIVNAQEDGLSHLASETVHYNPSDLSNWLESMLSEFNPAPNCPLDNPFLPHISQSSAIAPLDYTNCSTQPKQEPSLFDSPSLDYDLKAIPGKALYSHIEQPPQQPPAPPLYQRENKRLKPTTSATTTANSVSSVTGGWGVPTESARPVVLVDSQETGIRLVHTLMACAEAVQQENLKLAEALVKQIGFLAVSQAGAMRKVATYFAEGLARRIYRLYPDKPLDSSFSDILQMHFYETCPYLKFAHFTANQAILEAFDGKKRVHVIDFSMKQGMQWPALMQALALRPGGPPSFRLTGIGPPSTDNTDHLHEVGWKLAQLAETIHVEFEYRGFVANSLADLDASMLELRDEESVAVNSVFELHSLLARPGGIERVLSAVKDMKPDIVTIVEQEANHNGPVFLDRFTESLHYYSTLFDSLEGCGVSPVNTQDKLMSEVYLGQQICNVVACEGPERVERHETLAQWRARLGSAGFDPVNLGSNAFKQASML

SEQ ID NO: 890 - protein, 173 aa, Physcomitrella patens
IVQDYSSGNMGSCDCEESSLSSILTLQDQREMFRSVFPGRSSDNSQEYDEDDEGSSQKLRFTKAQLRVLEDTFERLQRPNAHQKSTLAMELGVQPRQVEVWFQNRRARGKAKRNESDCEVLRQRCQDLLVENHHLSYLIQTERMGYDSRQLSNEGGPLLQMALCNNCKKLRNC

SEQ ID NO: 891 - protein, 643 aa, Catharanthus roseus
MNLGGGQLVKSMAVPSSSASWKSGGDGVSDQFPAGLRVLVVDDDPTCLRILEKMLKNCLYEVTKCNRAEIALKLLRDNRNGYDIVISDVHMPDMDGFKLLEQVGLEMDLPVIMMSADDSKNVVMKGVTHGACDYLIKPVRIEALKNIWQHVVRKGKHEWKEKDYEQSGSVEDGERQQKPNEDVDYSSSANEGNWKNSKKRKDDEEDQEEKDDSSTLKKPRVVWSVELHQQFVAAVNQLGIDKAVPKKILELMNVPGLTRENVASHLQKYRLYLRRVSGVSQHQNGLNNSFMGTPDATFGSMSSINGLDFQALAATGQIPAQSLASLQAAAIGRPTSKPTISMPVVDQRNLFSFEPHKLRFGEGQQQLNGSTKQISLLHGIPTNMEPKQLASLNQSAQTFGGINMQVSSQASQGNTLLMQMTQPMSRAPMLNENNASQISRLPSSVGQAILSNGIPSGVLGRNGIVDSVRGPVYTPVSQTSSLVDFSVSNSAELPGSTFPHASNSGISSLTPKGMMQEEVNSEGKGSRGFPSSYDIFSELQQHKTQDWGLQNVGSTFDGTQHSSIQGSLEGGRNNPPNFGQQFSSYMVDNSLRIKSERHPDANCQTNLFPQLFGQDDLMSALLKQEGIGSVESDFGFDGYALDL

SEQ ID NO: 892 - protein, 313 aa, Helianthus annuus
MTCTGMAFFSSNFMLQSSQEDDHHAPTSLSPILPPCSTTTQDFSGAAFLGKRSMSSYSGLNNNNMDGCDQEGNMNGEDELSDDGSQLLAGEKKRRLNMEQVKTLQRNFELGNKLEPERKMQLARALGLQPRQIAIWFQNRRARWKTKQLEKDYDALKRQFEAVKAENDSLQSQNHKLHAEIMALKNREPAELINLNIKETEGSCSNRSENSSEIKLDISRTPATDSPLSSHHQHQHQPIPNLFPSSNIDRPNSNNIVAHQLFHNSSSRPADHQLHCHKLDQSNAIKEECFSTMFVGMDDQSGFWPWLEQPQFN

SEQ ID NO: 893 - protein, 123 aa, Brassica napus
MGTINQGISLFDEPQNIINPNNTNHLGLFFSFPNQTLSSSSSSSSSPPSSLVSPFLSYHSLNSFLHNNSSSFVIHPQDPINLIANLPETLISISSLSSPKQRDLHDGIVNTDHHCLTGGISSQ

SEQ ID NO: 894 - protein, 217 aa, Brassica napus
NSHFDPIFPFFTWGRGEQNGKKACCDKKGLKKGPWTPEEDEILVEYINKNSHGSWRLLPKKAGLLRCGKSCRLRWTNYLRPDIKRGPFTPQEEKLVVQLHAILGNRWAAIAAQLPGRTDNEIKNLWNTHLKKRMLSMGLDPKTHEPLPSHGLAKQASASQTTRHMAQWESARLEAEARLSRESMLFNPSCEVKYECDHFSRIWNQKWRIFKTYYYSQ

SEQ ID NO: 895 - protein, 160 aa, Physcomitrella patens
MSSRGGSDDEDEGTTRKKLRLSKEQSALLEESFKEHSTLNPKQKNALAKQLGLRPRQVEVWFQNRRARTKLKQTEVDCELLKRCYESLKEENRRLQKELLELRAIKVAPPCVISHDYYMPLPAATLTMCPSCERVATVDNRSLTFAKPGFSHLSQSSAAC

SEQ ID NO: 896 - protein, 307 aa, Physcomitrella patens
MAITSMGHYSGQNEVFTGNGNTSDSFAAMIGPCSPHVDLQALRRSGGGLGDDGQSQGGGQKRRYFASYDAPKMEDGPEDADEGTEDGTGNGSQLEKKRRLTIEQVRSLEKNFEAENKLEPERKMRLAKELGLRPRQVAIWFQNRRARWKTKQLERDYETLESDYKRLKADYEQVLSEKNHLKAELQRKSRDVPASKQDDNNLGLESIQTPERDRHVSDSDARQLNSRSSPTVNISRVKDEISGSTDGNSSDIVDADSPRTTNSSRKSVIQSSDFPPESLMGHPQLLDTYPEEKIRIRHRRKTGGQFS

SEQ ID NO: 897 - protein, 210 aa, Oryza sativa (japonica cultivar-group)
MVMVTAAAARRRPSLGRQKIEIRRIESEEARQVCFSKRRAGFFKKASELSILCSADVAAVVFSPAGKAYSFGHPSVEFLLDRFLSSSLPATAGKEEGSSVSVVAELNRQYGELRAMVDAHKARRERAEKTMEKQRQRQPAAWMDPEAEVGRMAPEELMALGTKLVAVQGGVAARADQMLRDALLLGRRPNTTTTTTTRAPPGFFHLHPHF

SEQ ID NO: 898 - protein, 345 aa, Physcomitrella patens
MAITSMGGYPCQSAMQQLIRNESSSDSLAAILTPCSPHVGLQAPPHVGGSLEDAVLVASEGSRQKRPFFATYDAPTVEDGSVEDDEGADDSQGASQLEKKRRLTFDQVRSLERNFEMENKLEPERKMQLAKELGLRPRQVAVWFQNRRARWKTKQLERDYEALAADYKSLKHDYDLVLAEKNNLKAEVQRLSGKAPTSPCADGNQIVAGESAQTPEVDVETSELVARQHTSRSTPTVDVSLACVKDKDFETSGCTDGNSSDVLDADSPRTTDSSSLSAMSDHDQLIYSHEIPPPESFMGLSGMLHDVTVKLEEGSGHGFHDDNSSNYFLLHLEDQAGVLPWWDWP

SEQ ID NO: 899 - protein, 242 aa, Triticum aestivum
  misc_feature (208)..(208): Xaa can be any naturally occurring amino acid
MTFSVSPAMEGGQGHEYMIRFHSHFDDPSPSTATAEPPPFAGRSISPEQEHGAMVAALLHVISGYTTPPPDFFFPAAASKEVCPVCRVDGCLGCEFFGAAEATGATAAALDAPKSAPAAVTAGGPQRRRRNKKNKYRGVRQRPWGKWAAEIRDPRRAVRVWLGTFDTAEDAARAYDRAAIEFRGPRAKLNFPFPEQQRGSRCPGPAEXGGQETGDQLWDGLQDLMKLDESELWFPPSGNSWD

SEQ ID NO: 900 - protein, 207 aa, Elaeis guineensis
RLIIFSTKGKLYEYATDSCMERILERYERYTYAEKALISSGPELQGNWCHEFGKLKAKVEALQKSQRHLMGEQLEPLNLKELQQLEQQLESSLKHIRTRKCQLMFESISELQKKEKSLQEQNKMLEKELMEKQKVKALNQQAPWEQQGPPQTSSSSPTSFLIGDSLPTLNIGTYQCSGNEHGEEAAQPQVRIGNSLLPPWMLSHLNG

SEQ ID NO: 901 - protein, 499 aa, Rhoicissus digitata
  misc_feature (231)..(244): Xaa can be any naturally occurring amino acid
SDMAEVAQKLEQLEEVIVNAQEDGLSHLASETVHYNPSDLSNWLESMLSEFNTTPNCPLDHPFLPPISQSPAISPLDYTNCSTQPKQEPSLFDSPSLDYDLKAIPGKALYSHIEQLPQQPPPPPLYQRENKRLKPTTSSTTNSVSSVIGGWGAPTDSARPVVLVDSQETGIRLVHTLMACAEAVQQENLKLAEALVKQIGFLAVSQAGAMRKVATYFAEGLARRIYRLYLXXXXXXXXXXXXXXHFYEACPYLKFAHFTANQAILEAFEGRKRVHVIDFSMKQGMQWPALMQALALRPGGPPSFRLTGIGPPSTDNTDHLHEVGWKLAQLAETIHVDFEYRGFVANSLADLDASMLELRDGESVAVNSVFELHSLLARPGGLERVLSAVKDMKPDIVTIVEQEANHNGPVFLDRFTESLHYYSTLFDSLEVAPVNTQDKLMSEVYLGQQIFNVVACEGPERLERHETLAQWRARLGSAGFDPVNLGSNAFKQASMLLAL

SEQ ID NO: 902 - protein, 296 aa, Physcomitrella patens
MAALGRAGETMSMTAVSSSGGGLEEEATGRGQKRPHHPISDKGPGEEPEEGDDCCYDGAHPMEKKRHLSFEQVRSLERNFEMEIKLEPDRKMKLAKELGLQPRQIAVWFQNRRARWKTKQLERDFELLNSGYSKLKRDFEKVLEEKDVLKAELVRLSAKIIPKDSQSVDFSQSEKDSHCKPTANDPAKSDKLKESKPATPKDNQSTRSSPTTVVCSATTLEAEITSTSSGSNSSDLLDADSPRTTDSNPREEQLANYCGQLLPENFVGHLTVEEAVNTSQKVYSVKLEDGLPSLPS

SEQ ID NO: 903 - protein, 250 aa, Triticum aestivum
TSLYKKAGWYRSGIPGISSPHAADPMLSPRVVRPQPHDGTASAGSSSSRRHMVDRVSEWELGLPSAAELTPVSQALIPPALAAAFGIGPADALSSPVDTGFLHDSPTSHLTSRFDEYDEEDEEEGEGETDDAAAGARRGGGGGKKARMVWTPELHHRFVEAVEHLGEKGAVPKAIVRLMNVDGLTRENVASHLQKYRLYLKRSSPGAAAPSPPPPPFFPRFDVQRPHQDSANRSGYCAYPYVSYQKLGCD

SEQ ID NO: 904 - protein, 499 aa, Rhoicissus rhomboidea
  misc_feature (231)..(254): Xaa can be any naturally occurring amino acid
SDMAQVAQKLEQLEEVIVNAQEDGLSHLASETVHYNPSDLSNWLESMLSEFNPTPNCPLDHPFLPPISQSPAISSLDYTNCSTQPKQEPSLFDSPSLDYDLKAIPGKALYSHIEQSPQQPPPPPLYQRENKRLKPTTSATANSVSSVIGGWGVPTESARPVVLVDSQETGIRLVHTLMACAEAVQQENLKLAEALVKQIGFLAVSQAGAMRKVATYFAEGLARRIYRLYPXXXXXXXXXXXXXXXXXXXXXXXXFAHFTANQAILEAFEGRKRVHVIDFSMKQGMQWPALMQALALRPGGPPSFRLTGIGPPSTDNTDHLHEVGWKLAQLADTIHVDFEYRGFVANSLADLDASMLELRDEESVAVNSVFELHSLLARPGGLERVLSAVKDMKPDIVTIVEQEANHNGPVFLDRFTESLHYYSTLFDSLEVSPVNTEDKRMSEAYLGQQIFNVVACEGPERLERHETLAQWRARLGSAGFDPVNLGSNAFKQASMLLAL

SEQ ID NO: 905 - protein, 226 aa, Eschscholzia californica
MGRGKIEIKRIENSTNRQVTYSKRRAGIMKKARELTVLCDAEVSLIMFSTTGKFSEYISPSVSTKRMYDRYQQVSETNLWNSHYESLQNNLNKQMEINNRLRIEIRQRMGEDLDDLSSNELRSLEQNLESSLKVVRERKYHVISTQSDTYKKKIRNHAETHQNLLRGIAEERDEDAYYTLANQDLDCESAIEMANGGVNIFAFRLQPSQPNLHDGARYNSHDLRLA

SEQ ID NO: 906 - protein, 285 aa, Triticum aestivum
  misc_feature (71)..(71): Xaa can be any naturally occurring amino acid
  misc_feature (259)..(259): Xaa can be any naturally occurring amino acid
MAGQPPQGPEDDFLDQFFSLTNSLSAAGRPSGDQPFSLALSLDAASDASARKGASAGEKPPATPEEGGGCXSRRFFPPGFGGGLPAAEPLAQATFPQRLFHAPAARSRAGRLEGPQPPAPRPKVRARRGQATDPHSIAERLRRERIPERMRALQELVPNTNKTDRAVMLDEILDYVKFLRLQVKVLSMSRLGGAGAVAQLVSDIPLSVKGEASDGGSKQQIWEKWSTDGTEKQVAKLMDEDIGAAMQFLQSKALCMMPXSLAMAIYDTQHSQDGQPVKPEPNNTA

SEQ ID NO: 907 - protein, 194 aa, Triticum aestivum
TRIAAAAEVPQDDEAIPDGELGEVSVSTYVNSLKNEFATLRSAEIKDMVENNKIKLSTIMQSNRGSSTIWQMSALDGTGLATNLLTPRQDDVSCSTLGLELCLAEKDGGSSQEDSPYGTLTATLGGILTAKNANKPIELPTVSGLPPYTTWVFLDRNQRMTEDQSAFHRQNIYYNADCGKALMFSDSEDGRRGR

SEQ ID NO: 908 - protein, 228 aa, Eschscholzia californica
MGRGKIEIKRIENSTNRQVTYSKRRAGIFKKALELTVLCDAQVSLIIFSTTGKFAEYISPTTSQKKLFDRYQQTSEIDLWESHYEQLQENLKKQKEINMKLCKEIRMRTGEEDLSELSIEELCNLEQNLENSTKIVRERKYHVLSTQSDTYKKKNRSLEESYKQLIRAFGGGDDENSQFVLADNETDVYGSSMRLSNGGSSHISFHLQTSHPNLQNSGEHYSYNLHFE

SEQ ID NO: 909 - protein, 310 aa, Zea mays
  misc_feature (66)..(66): Xaa can be any naturally occurring amino acid
  misc_feature (82)..(82): Xaa can be any naturally occurring amino acid
  misc_feature (123)..(123): Xaa can be any naturally occurring amino acid
MGAEAAERDRIRGPWSPEEDEALRRLVERHGARNWTAIGRGVPGRSGKSCRLRWCNQLSPRVARRXPFTADEDAAIARAHAXRLGNRWAAIARLLPGRTDNAVKNHWNCSLKRKLGAAAAASXSAVSADDSAAAAETEARRGKMMMMSISPPDSPSGSGSGSDRSDLSSHGAGSGSGSGSGQIYRPVAARSGGFEPADCAMSRPQEEDPLTALSLSLPGTDQRFHHHSAAADSHFQELPPSPSSPAPSAYPFSPEFAAAMQQLIRTEVQRYMASAGLRAGCGAVGATDLCMPQLVDGVMRAAAEQVGRMQ

SEQ ID NO: 910 - protein, 235 aa, Musa acuminata
MGRGKIEIKRIENTTNRQVTFCKRRNGLLKKAYELSVLCDAEVALIVFSSRGRLYEYANNNIKSTIERYKKACADSSSSDAIVDVNSQHYYQQESAKLRHQIQVLQNANRHLMGDALSSLNVKELKQLENRLERSITRIRSKKHELLFAEIEYMQKREVELQSDNMYPRAKIAENERVQQLSIVEAGAEYDAIPGAFDSRNYYHANILEAAAHYSHHQDQTALQLGYETKADSAA

SEQ ID NO: 911 - protein, 370 aa, Solanum tuberosum
MNSSTYTQFVASKRMGICDPIHQIGMWGDFKGSSFPDTLILEVENCLENEMPIMEKRLENEIEEPSQVTVGMSNRYEPETTKRIDKVRRRLAQNREAARKSRLRKKAYVQQLENSKLKLLQLEQELERNRQQGLYVGDGLDASQIGCSGTANSGIASFEMEYGHWVEEQDRQTDDLRNALNSQMGEIELRILVESCLNHYFDLFRLKATAANADVLYLMSGTWKTSAERFFLWIGGFRPSELLKVLTPHVEPLSDQQIQEVSNLTQSCQQAEDALSQGMVKLHQILAEAVAAGTLGEGIILPQMTATIEKLEALVRFVNQADHLRQETLLQMSCILAAHQSAQGLLALGEYFKRLRALSSLWAGRLSEPA

SEQ ID NO: 912 - protein, 652 aa, Oryza sativa (japonica cultivar-group)
MAIKGGGGSAENRGRSPLAMVVAVGLCCFFYLLGAWQRSGYGKGDSIAMAVNRQTAACGGVGLSFETHHGGAGVENETMAAPAPEFAACAAAMADHTPCHDQERAMRFPRENMVYRERHCPGDGERLRCLVPAPPGYVTPFPWPRSRDYVPFANAPYKSLTVEKAVQNWVRHEGRLLRFPGGGTQFPGGADKYIDQLATVVPFADGSVRTVLDTGCGVASLGAYLDARGVIAMSFAPRDSHEAQVQFALERGVPAFIGVLGSIKLPFPPRSFDMAHCSRCLIPWSANGGMYMMEIDRVLRADGYWVLSGPPINWRTNHKAWERTEADLAAEQQLIEEYAAMLCWEKLAEMGEAAVWRKRPDAAVVSCPTATPAPPRTCDAAAASPDDVWYKKMEPCITPPQAAGEVMLRPFPERLTAVPPRVAAGEVPGLTGESYAEENARWERHVAAYRKVNYRLDAGRYRNIMDMNAGVGGFAAAVFSPKSWVMNVVPTAAELSTLGVVYERGLIGIFHDWCEAFSTYPRTYDLIHGNGVFTLYKDKCKMEDILLEMDRILRPEGTVILRDDIEVLLKVQRIASGMRWKMIMANHEDSPHIPEKVLYAVKRYWTADDKSSEPEPEPEKMKKKAGSSSQERSSEEEEESTASSSEEKGSEE

SEQ ID NO: 913 - protein, 224 aa, Phalaenopsis equestris
MGRGKIEIKKIENPTNRQVTYSKRRAGIMKKAREITVLCDAEVSLIMFSSTGKFSEYCSPSTETKKVFERYQQVSGINLWSSQYEKMLNTLNHSKEINRNLRREVRQRMGEDLEGLDIKELRGLEQNIDEALKLVRNRKYHVISTQTDTYKKKLKNSQETHRNLMHELEIVEDHPVYGFHEDSSNYEGVLALANDGSHMYAFRVQPNQQNLQGTGYSSHDLRLA

SEQ ID NO: 914 - protein, 158 aa, Arabidopsis thaliana
MENSENVPSYDQNINFTPNLTRDQEHVIMVSALQQVISNVGGDTNSNAWEADLPPLNAGPCPLCSVTGCYGCVFPRHEAIIKKEKKHKGVRKKPSGKWAAEIWDPSLKVRRWLGTFPTAEMAAKAYNDAAAEFVGRRSARRGTKNGEEASTKKTTEKN

SEQ ID NO: 915 - protein, 359 aa, Medicago truncatula
MSDMKDRQRWRAEEDALLRAYVKQYGPREWNLVSQRMNTPLNRDAKSCLERWKNYLKPGIKKGSLTEEEQRLVISLQATHGNKWKKIAAQVPGRTAKRLGKWWEVFKEKQQRETKGSINRTVDPINDSKYEHILESFAEKLVKERPSPSFVMAASNSSYLHTDAQAPTPGLLPSWLSNSNNAAPVRPNSPSVTLSLSPSTVAAPPPWMQPVRGPDNAPLVLGNVAPHGAVLSYGESMVMSELVDCCKELEEVHHALAAHKKEAAWRLSRVELQLESEKASRRREKMEEIEAKIKALREEQAVALDRIEGEYREQLAGLRRDAETKEQKLTEQWAAKHLRLTKFLEQVGCRSRHAESNGR

SEQ ID NO: 916 - protein, 298 aa, Zea mays
MGVPKQRWTPEEEAALKAGVAKHGPGKWRTILRDSDFSALLRLRSNVDLKDKWRNLSVTAGGYGSREKARMALKKGRRVVPKLTAEPMDVDEKDMDNAHDTVIDVEPLAMAFEPLPFLESPDKSVARLDDLIVEAIRKLNEPSGSNKAVISGYIEDQYWPPADFQYLLSTKLKSLVNSGKLIKVNQKYRIAPSSSLGGISTKVSSSEGMNTENNNVKRLTKPQVVAELEKMKGMTREEAAAFAAKAVAEAEVAMAEAEEAARVAEAAENDAEAAKAFLDAVILSMRNRNAASMILRAC

SEQ ID NO: 917 - protein, 218 aa, Physcomitrella patens
MRNIGSNTNSLVAMLQGSCSPRIASNQVPRSMGSPKDMTKVCGQKRPFYPTIDRRSVEEPDDDDEGADEFSLRSEKKRRLSFDQVQSLERSFELENKLEPERKLQLAKELGLQPRQVAVWFQNRRARWKIKQLERDYGALAKDYNRLKEEFEAVSPAHPIPSRELCRSQLSTSLRGSEPRCGSCWCPSEDSQPRCRSSLRCLSNGGANHFDPIGWDWD

SEQ ID NO: 918 - protein, 68 aa, Glycine max
LCGILRFWGVCCRTKLKQTEVDCEFLKKCCETLKDENRRLKKELQELNALKLAQPLYMPMPASTLTMC

SEQ ID NO: 919 - protein, 415 aa, Triticum aestivum
MALVKSHHQMLASSSTSSSSPSSQQQPPPPPPPLAPPPPATDQPSPAKRKRRPPGTPDPDAEVVALTPRTLLESDRYVCEICGQGFQREQNLQMHRRRHKVPWRLVKRAPAPSAGEDGGAGTAGGAGATTVPRKRVFVCPEPSCLHHDPAHALGDLVGIKKHFRRKHGGRRQWVCARCAKGYAVQSDYKAHLKTCGTRGHSCDCGRVFSRVESFIEHQDACNSGRMRGEAGDVPSALPVLRPVVIRHPAPGVPSTPPPELQLLPVATKAPVNATPAVFSASHEPHATTKLELSIGPVASSDGVSGADDGREEMMRAMQEKAAADAERARAREEAAAAERALEEARRARQRARGELEKACALRDHAARLLAHVTCHACRQRSFGMVPMGVAAGGDGGHGGSAVACEALRRGAGLGL

SEQ ID NO: 920 - protein, 289 aa, Arabidopsis thaliana
MSELLQLPPGFRFHPTDEELVMHYLCRKCASQSIAVPIIAEIDLYKYDPWELPGLALYGEKEWYFFSPRDRKYPNGSRPNRSAGSGYWKATGADKPIGLPKPVGIKKALVFYAGKAPKGEKTNWIMHEYRLADVDRSVRKKKNSLRLDDWVLCRIYNKKGATERRGPPPPVVYGDEIMEEKPKVTEMVMPPPPQQTSEFAYFDTSDSVPKLHTTDSSCSEQVVSPEFTSEVQSEPKWKDWSAVSNDNNNTLDFGFNYIDATVDNAFGGGGSSNQMFPLQDMFMYMQKPY

SEQ ID NO: 921 - protein, 269 aa, Triticum aestivum
MTFSVSPAMAGGQGHEYMIRFHSHFDDPSPSTATAEPPPFAGRAISPEQEHGAMVAALLHVISGYTTPPPDFFFPAAASKEVCPVCRVDGCLGCEFFGAAEATGATAAALDAPKSAPAAVTAGGPQRRRRNKKNKYRGVRQRPWGKWAAEIRDPRRAVRVWLGTFDTAEDAARAYDRAAVEFRGPRAKLNFPFPEQQQQQQLGDGNAAPAKSDTCSPSPSSAEVEVRVPQTWQQNGGQETGDQLWDGLQDLMKLDESELWFPPSGNSWD

SEQ ID NO: 922 - protein, 144 aa, Brassica napus
MKQTNAHMERQIMNKRKRVFSVQEKKNPKAVFAKRYVSHLVPALKKINMNKPSSQINSKSFEQTVKHEVDMALALSAQEFAWSRFLQHKLLSSPHEDPSYSSKILETSSCKQDGKEGAEIKKKLKELQKLVPGGEELNMEEILS

SEQ ID NO: 923 - protein, 383 aa, Saccharum arundinaceum
MCGGAILSGFIPPSGVAAAAAAKKKQQQQRRVTADLLWPGPGKKGAPQEEDFEADFREFERGLSEGGDDEVQELPAPQPARFAFAAAPKAPRPEVDGVMTPKDAYGDRPTANSIKRNRKNQYRGIRQRPWGKWAAEIRDPSKGVRVWLGTYNTAEEAARAYDAEARKIRGKKAKVNFPDEVSGAQKSTAKPTAANATKLAQPPKACADEVFNNLNNDNNDLFAMFAFNDNKVPVKPAEGARFLPAVKPLVPSKRSATYMLSDQSSNSYGSSDFGWDDDTMTSDYTSVFAPNNVIPAPYMQGGVSKRMRNNYGVAMLQGNGVPSLTQVMPCFDPEMNYQPLPYVESSSSDASMDSLLQTDIPQDVASNGDIWSLDELLMAAGAY

SEQ ID NO: 924 - protein, 219 aa, Phalaenopsis equestris
MGRGKIEIKKIENPTSRQVTYSKRRLGIMKKAEELTVLCDAQLSLIIFSSSGKLADFCSPSTDVKDIVERYQNVTGIDIWDAQYQRMQNTLRNLREINRNLQKEIRQRKGENLEGLGVKELRGLEQKLEESVKIVRQRKYHVIATQTDTCRKKLKSSRQIYRALTHELQKLDEENQPCSFLVEDLSCIYDSSISMANRLHRSEPNVQKVVRECHEFGFD

SEQ ID NO: 925 - protein, 206 aa, Daucus carota
MEIDKVYEDADDVLLSSERPPPSSEFLDSFWISKSSPSFQENSASGTTTMVHLQNSPPENGRLGGFLPSLEKEENGIEDYDPCLHPPEKKRRLTVDQVKYLEKSFEVENKLEPDRKVQLAKDLGLQPRQVAIWFQNRRARYKTKQLEKDYDSLKECYDKLRDDHDRLSKENEKLRLEVILDYKSLQFCSCFIQILLDCQCACDYTV

SEQ ID NO: 926 - protein, 163 aa, Medicago truncatula
MEDAQQNKRRRVYSVEPNTIVQTIFARNYLSYLVPALMKIKENNISSKENIKNVKYEVDMAMVSSAQGFAWSDGLKLKLQKECNVNDVATNSRSIIENEASEDEEKMKNLIRLIPGGEDICDEQVVNELESYIRCLQMQENKGKEESEYVVMNETHTNFDMNT

SEQ ID NO: 927 - protein, 227 aa, Phalaenopsis equestris
MGRGKIEIKKIENPTNRQVTYSKRRVGILKKAKELTVLCDAQVSLIMFSSTGKLADYCSPSTDIKGIYERYQVVTGMDLWNAQYERMQNTLKHLNEINQNLRKEIRRRKGEELEGMDIKQLRGLEQTLEESLRIVRHRKYHVIATQTDTYKKKLKSTRETYRALIHELDMKEENPNYGFNVENQSRIYENSIPMVNECPQMFSFRVVHPNQPNLLGLGYESHDLSLA

SEQ ID NO: 928 - protein, 222 aa, Phalaenopsis equestris
MGRGKIEIKKIENPTNRQVTYSKRRAGIMKKASELTVLCDAQLSLVMFSSTGKFSEYCSPTTDTKSVYDRYQQVSGINLWSEQYEKMQNTLNHLKEINHNLRREIRQRMGEDLEGLEIKELRGLEQNMDEALKLVRNRKYHVISTQTDTFKKKLKNSQETHRNLLRELETEHAVYYVDDDPNNYDGALALGNGASYLYSFRTQPSQPNLQGVGYVPHDLRLA

SEQ ID NO: 929 - protein, 318 aa, Oryza sativa (japonica cultivar-group)
MTRRCSHCSHNGHNSRTCPNRGVKIFGVRLTDGSIRKSASMGNLSLLSSAAGSTSGGASPADGPDAAPTAADGYASDDFVQGFSSATRDRKKGVPWTEEEHRRFLLGLQKLGKGDWRGISRNFVVSRTPTQVASHAQKYFIRQSNMTRRKRRSSLFDMVPDESMDLPPLPGGQEPETQVLNQPALPPPKEEEEVDSMESDTSAVAESSSASAIMPDNLQSTYPVIVPAYFSPFLQFSVPFWQNQKDEDGPVQETHEIVKPVPVHSKSPINVDELVGMSKLSIGESNQETESTSLSLNLVGGQNRQSAFHANPPTRAQA

SEQ ID NO: 930 - protein, 202 aa, Arabidopsis thaliana
MDNFNVVANEDNQVNDVKPPPPPPRVCARCDSDNTKFCYYNNYSEFQPRYFCKNCRRYWTHGGALRNVPIGGSSRAKRTRINQPSVAQMVSVGIQPGNRFSSLSHIHGGMVTNVHPTQTFRPNHRLAFHNGSFEQDYYDVGSDNLLVNQQVGGYVDNHNGYHMNQVDQYNWNQSFNNAMNMNYNNASTSGRMHPSHLEKGGP

SEQ ID NO: 931 - protein, 376 aa, Oryza sativa (indica cultivar-group)
MDALKSSCRSEEAADEGAAAAPSAWGMVERDGFSVEDLLDLEEFCEAEKDAAEENEQALALVAAPEEEKSKDDSQPSSVVTYELVAPPPPPPEIVDLPAHDVEELEWVSRIMDDSLSELPPPPQPPASVVASLAARPPQPRQLQRRPQDGAYRALPPASYPVRTPTICALSTEALVPVKAKRSKRSRATAWSLSGAPPFSDSTSSSSTTTTSSCSSSASFSSFSPLLKFEWHPLGGTSDLPDDHLLPPGKKSKHGKNGKNKPKKRGRKPKQLPPHPSGAAASAPAPGDRRCSHCGVQKTPQWRAGPEGAKTLCNACGVRYKSGRLLPEYRPACSPTFVSAIHSNSHRKVLEMRRKKEVGSGLLTAAAAAAPAVASF

SEQ ID NO: 932 - protein, 299 aa, Medicago truncatula
MREDDSNWFSRWEEQLPPPEELMPLSQTLITPDLAIAFDIRNNPNPPTIPPPQQQQQQPPPSSLPSSTDFADSTELTSGTAGEEPARTLKRPRLVWTPQLHKRFVDAVAHLGIKNAVPKTIMQLMSVDGLTRENVASHLQKYRLYLKRMQGISSGGGGGASGGGSASVNDAATDHLFASSPVPPHFLHPVARPNSDHFMPFVPVPAIHHQQQMAAAQYHRPVGHFGSPPNGHFDNPFLSRQQHHQQQNQHQHQQQLHRIGAQVHHNTLGGGGGGYVEDMESANASGGRKVLTLFPTGDD

SEQ ID NO: 933 - protein, 428 aa, Oryza sativa
ILKQFSAKQNGHQELHLVDHPFNNVTDGHEYYSPSAGGSFLPFATYYDLGHEYYPQGGEKDAVVVDRASPTIRKASPHLPLFTPKSEVSHLIGGGVVGSYKAFEMNSRLIRRKRASGKSLKKANVVKGQWTLEEDRKLVKLVEQFGLRKWSHIAQILPGRVGKQCRERWHNHLRPNIKKDTWSEEEDIVLIQTHKEVGNKWAEIAKHLPGRTENSIKNHWNATKRRQFARRRSRASSKNPKSGTLLQNYIKSLGIGPIKSSVRQAPPESTAVSSSSPASTQKLAEVNGKIRPDSNPSNQMVTQGILTMDENSYIQTNSCEELLVSTYDDLCLDMCDHLFETKDEMPYQVYNIDDDVDMNYIFNHIDYANKIGHEIDMEMAWDDDVLQDDESAGSSPLETPAGLAQINTVHVKEEMDLIEMVTRTQSCG

SEQ ID NO: 934 - protein, 140 aa, Triticum aestivum
GSRLQGQNLVVTIEDDSETTPGQAGDAVDEHVDILLSLTLGRYPRHGHQRSSNISTSPVIHIIDTPSNALPEPEKAVPKEPTFNCPVCMNELVEPSSTICGHIFCKQCIKASIQAQKKCPTCRRKLTMNNFHRVYLPSAE

SEQ ID NO: 935 - protein, 468 aa, Oryza sativa (japonica cultivar-group)
MALVKSHHQMLASSSTSSSSPSSQQQQPPPPASNSSSLAAAAADQPSPAKRKRRPPGTPDPDAEVVALSPRTLLESDRYVCEICGQGFQREQNLQMHRRRHKVPWRLVKRPAAATAAEDGGAAGGGGGAGGGAGGGGARKRVFVCPEPSCLHHDPAHALGDLVGIKKHFRRKHGGRRQWVCARCAKGYAVQSDYKAHLKTCGTRGHSCDCGRVFSRKITRSLNLYSDIANYLRMKYIISLSNIAIKVESFIEHQDACNSGRVRGEVVPVATTLPVIRPAALRHHHHHPPPPPPELQLLPASTTAPLAAAFSSNSTTTGSSSHEQHATTMTTTKLQLSIGPAAVVAAASGGGGACAAAAGGEEEQQREEVRRALEEKTAADAARERAREEAAAAERALEDARRARHRARGELEKALALRDHAARLIAQVTCHACRQRSLAVMSMAAIDGHGASAVAREHLRGGGVGAGI

SEQ ID NO: 936 - protein, 332 aa, Oryza sativa
  misc_feature (233)..(233): Xaa can be any naturally occurring amino acid
MDGRFPLPPASGGGRGHHRRAHSETFLRLPDADLLLDPEGDFSFSDLDFPSLSDDSPAISDPTPPPPPPMAATPAPAPRPPGGAHMRSLSLDTAFFEGFSLQGGGGGGGGGGGGGSGGSGGHKRSGSMDGVNSPFEGESALSGGLPDYAKKAMPAERIAELALIDPKRAKRILANRQSAARSKERKIKYTSELERKVQTLQTEATTLSAQLTLLQRDTSGLTAENRELKLRLXSPWEEQAKLRDALNEALREEVQRLKIAAGQAPNMNGNPFNGGLQQQIPPYYTQQQQQQQQMPYLGGHHAQQRHPSHQQSSSNGGQSLSGQSLNDSMDFM

SEQ ID NO: 937 - protein, 161 aa, Glycine max
AIARCAWLRRGPVAGSGSGAGESPATANKGLKKKVVNSLPKFTYAGGGDRCKWSECAICLTEFGAGDEIRVLPQCGHGFHVACVDTWLASHSSCPSCRAPFAVTARCHKCGHFPAVSAAARRRRQWRMRMVIMLLLRMDLVITVSCLESCFSNYEFACKYR

SEQ ID NO: 938 - protein, 301 aa, Daucus carota
MSTCTREMDFFPANFMIQNHQHQEQEEQVHQFPHIQNHMLPPQDFHGTIGSFLGKSSMTYSRVDQHLHEESNVNGDHVDDLSDADDEDGSGALGSGGSKKRRLNIMQLKTLEKSFELGNKLEPERKLELSRALGLQPRQIAIWFQNRRARWKTKQLEKDYDLLKSQFDSLKAENDSLQSRNKALHAQILALKNREPTDSINLNKETEGSSSNNRSTENSYEIKPDFSRTPPAIDSYPQKITSIPFFPPNTSNFIRLQQPALHLSRPSDHHHHQPVKEEDFCNMLDDQTAFWPWLEQQQPFN

SEQ ID NO: 939 - protein, 348 aa, Brassica nigra
MLKQESNWAQACDTCRSAACTVYCRADSAYLCTSCDAQIHAANRLASRHERVRVCESCERAPAAFFCKADAASLCTACDSQIHSANPLARRHQRVPILPISGCVATNHHSSETTEPENIVVVGQEEEDEAEAASWLLPSSVKNCGDNNNNTENNRFSVGEEYLDLVDYSSSIDKRFTGQTNQYQQDYNVPQRSYVADGVVPLQVGVSKGHMHHEQHNFQFGFTNVSSEAHQISNGSPIHMVSLVPESVTSDATVSHQRSPKAGTEELPEAPVQMLSPMERKARVLRYREKKKTRKFEKRIRYASRKEYAEKRPRIKGRFAKRNEVDADQAFPTVVMFDTGYGIVPSFS

SEQ ID NO: 940 - protein, 279 aa, Daucus carota
MVSFQDAKRKNPYDGFFMRSYDEEEIGDEEYDEYFQQPEKKRRLKADQIQFLEKSFETDNKLEPERKVQLAKELGLQPRQVAIWFQNRRARWKTKTLEKDYDVLQNSYNSLKADYDNLLAEKEKLKAEVLDLTDKLLLKEDKGSKTVVFDKQKVSAAFQQERVSNDISVGEVLSNSVMDCKQEDHNSVKSDAVDSDSPHYSDEVYSSFMEPVDRSYVFEPAQSDISQDEEDDMGNNLFLPSYHVFSKTEDGSYSDQPSNSSYFGFPVEDHTFGFWGTEL

SEQ ID NO: 941 - protein, 308 aa, Daucus carota
MDFFPANFMLHHHQEQDHRRNHIQNPASQFIDSSQNLLPPQDFHGTIGSFLGKRSMSFSGGDHHQQQLNEESNIHGDHVDDLSDPEDDDGSGTVGSGGSKKRRLNMEQVRTLEKSFEMGNKLEPDRKLELARALGLQPRQIAIWFQNRRARWKTKQLEKDYDLLKSQFDAVKAENDSLQSHNQKLHAQIMALKNGEPTESINLNKETEGSSSNRSTENSSEIKPDFSRTSPAIDSHPHKLTSIPLFPPPNNNNKSSFFRLQQPAAFHMSRPSDHPHQQSVKEEHFCNMFTGVEDQTAFWPWLEQQPFN

SEQ ID NO: 942 - protein, 315 aa, Glycine max
  misc_feature (265)..(265): Xaa can be any naturally occurring amino acid
MTVEKEDLGLSLSLSFPQNPPTHLHLNLVSSSPSSHNPQKPSWNDPFTSSAGSSFLRGIDVNRLPSVVDCEEEAGVSSPNSTVSSVSGKRSEREEANGEENDTDRACSRGIISDEEDAETSRKKLRLSKDQSIILEESFKEHNTLNPKQKLALAKQLGLRARQVEVWFQNRRARTKLKQTEVDCEFLKRCCENLTVENRRLQKEVQELRALKLSPQFYMHMTPPTTLTMCPSCERVAVPPSSAVDPAMRHHHVPPTQPRAFPIGXMGHRCRHYPAQALRCPPSQILTRRNKMTKFEKKKTVVIVGSHELCVQSVV

SEQ ID NO: 943 - protein, 348 aa, Brassica nigra
  misc_feature (321)..(321): Xaa can be any naturally occurring amino acid
MLKQESNWAQACDTCRSAACTVYCRADSAYLCTSCDAQIHAANRLASRHERVRVCESCERAPAAFFCKADAASLCTACDSQIHSANPLARRHQRVPILPISGCVATNHHSSETTEPENIVVVGQEEEDEAEAASWLLPSSVKNCGDNNNNTENNRFSVGEEYLDLVDYSSSIDKRFTGQTNQYQQDYNVPQRSYVADGVVPLQVGVSKGHMHHEQHNFQFGFTNVSSEAHQISNGSPIHMVSLVPESVTSDATVSHQRSPKAGTEELPEAPVQMLSPMERKARVLRYREKKKTRKFEKRIRYASRKEYAEKRPRIKGRFAXRNEVDADQAFPTVVMFDTGYGIVPSFS

SEQ ID NO: 944 - protein, 153 aa, Debaryomyces hansenii CBS767
MATGQQRKIDLTQLQPQQIIEFRKSTEQEINHFTQSLQALQTAQSRLKECINSVDNMEKSNASELLVPLTSSLYLPGKIAKKDEYLVDIGTGYFVNKLAKETKSVYESKIEKLNGDSKKLKEILVQKNEILNSINLVLRNKMIEYEKQQKQQQ

SEQ ID NO: 945 - protein, 197 aa, Triticum aestivum
  misc_feature (42)..(42): Xaa can be any naturally occurring amino acid
  misc_feature (107)..(107): Xaa can be any naturally occurring amino acid
MASPEGSNWVFDCPLMDDLAAADFAAASTGGFYWTPPMQPQXTLLRRPSPPPRAPNPCAEINSSVSVDWDHAKGQPKNKRPRSETGAQPSSKACREKVRRDKLNERXEKNELRDEKQKLKAEKESLEQQIKFMNARQSLVPHPSVIPAAAFAAAQGQAAGHKLMMPVMSYPGFPMWQFMPPSDVDTSDDPKSCPPVA

SEQ ID NO: 946 - protein, 305 aa, Kluyveromyces lactis NRRL Y-1140
MAPDMKFPFADAPSIVQAHQKDDTVENLLLQKIQDVLRKVKGQQFTNRYVSEIMILSKLIYLSITTLRYRRTLGEEYVDLAYVDRRGKGVARLLRRIGFAISYCGVPWILSKVFYKYKLNERGSGFLKVFNGKSFRDILDSTLNLHLIIFYLSGQYYDISKRIFGMRYVVGHEMNKNEVEFKKKSSQNYKILGFILGMQLASKLLPQIAEYIADRIGTDDGKSHKSLSALAKKHTSKDLSDLEVLPFIKEDSRKCVLCLNYMLDPSATPCGHLFCWDCIMEWTLERQECPLCRQRCPRQLTIPVR

SEQ ID NO: 947 - protein, 402 aa, Candidatus Pelagibacter ubique HTCC1002
MKNVLKNTIRKKIYLSKKKLIEQPLKILKKINIEKLTKFTSSSLIEKYNNFKERAKQKELHRIKLIKEEKIKELKKEKLEQEKQKNEEIRLIKQNELNLIKEEKQRIANEEKLKEKIIKQQQQIERKKIKLESQRIKAEEQKLRDEEEEKERQDDLKIKEEKLKLEFFEKQRIRQEQQKAKIENDKLMALEKQKAREAKQKIKDEEERLKNIEIDKQKKNMQKLIEEEHKLNYQKQKLEEIEQSIKKIEIERIREKEIKILKEADELREKEKQLRLKEQLEIEELNELRLNELNQRKIQEELQLKEEKIRLENLREQKIIQARILEEKRIKDEEERIKEWERKFDEEQIAKEEELIKKFNDQLIKEKEQSEKIIEFKKEEVIEEKKEEILENEVKKEEDDRY

SEQ ID NO: 948 - protein, 284 aa, Oryza sativa (japonica cultivar-group)
MEADASHTPTTSSSVSVSFSSSSLSTSSSTSSLVDNGAQDRPKSSKPKHAAKKRKRAAAEEPANAAHGAGEDTSSCSTDDNAAASGKAQAGGGGGGVDSSSTCTAASAPRSGFKHPSYRGVRRRSWGKWVSEIREPRKKSRIWLGTFPTAEMAARAHDVAALAIKGRNAHLNFPDSAHELPRPESTSPADIQAAAAKAAAEVRCEEESSPSSSPTAEQPEEEAACPDTVHADGGQDNALFDLPDLLLDLRDGLWWSPVWPAALAAEEYDGGDAVVLNEPLLWAE

SEQ ID NO: 949 - protein, 217 aa, Pisum sativum
MDKKPCNSSQDPEVRKGPWTMEEDLILINYIANHGEGVWNSLAKAAGLKRTGKSCRLRWLNYLRPDVRRGNITPEEQLLIMELHSKWGNRWSKIAKHLPGRTDNEIKNFWRTRIQKHIKQVDNPNQQNFQQKMSLEINDHHHHHPHQPSSSQVSNLVEPMETYSPTSYQGTLEPFPTQFPTINNDHHQNSNCCANDNNNNNYWSMEDIWSMQLLNGD

SEQ ID NO: 950 - protein, 228 aa, Lilium longiflorum
MGRGKIEIKKIENSTNRQVTYSKRRTGIIKKATELTVLCDAEVSLLMFSSTGKLSEFCSPSTDTKKIFDRYQQLSGINLWSAQYEKMQNTLNHLSEINRNLRKEISQRMGEELDGLDIKDLRGLEQNLDEALKLVRHRKYHVINTQTETYKKKVKNSEEAHKNLLRDLVNREMKDENPVYGYVDEDPSNYDGGLGLANGASHLYEFRVQPSQPNLHGMGYGSHDLRLA

SEQ ID NO: 951 - protein, 136 aa, Triticum aestivum
YQILGIFLLIQLCILGAERLRRSNLSSIASSINQISSGSYPSSTGRSVPVVNEDGNIISDIRHGKAVDLASGSEASSSKSKCTLCLSTRQNPTATTCGHVFCWNCIMEWCNEKPECPLCRTPITHSSLICIYHSDF

SEQ ID NO: 952 - protein, 394 aa, Zea mays
MASFVVHHHGSPLDREGKVKMSALALRSSLRPCEAAEEVGAGQAWCRGADMGVAAFVDEFSVEDLLDLEDLCEVDKDCAELGDTVPAAESVQEGDKVSSDSHGSSVLSYELMTLPVPHPMIDLPLPAHDAEELEWVSRIMDDSLAELPPPPKLPAAPLGAARRPLEGAVAGPMRSPTTTICALSTEALVPVTRAKRSKRSRGSVWSLSGGAPLSESTSSSSTATTSSCSSSASFSPLLLLPADPSLVLSSHLLDETPRPKKKSKHGKHGKSGKPKKRGRKPKHHPKPPQFSGGAAYAPAQGDRRCSHCGVQKTPQWRAGPEGAKTLCNACGVRYKSGRLLPEYRPACSPTFVSSIHSNSHRKVLEMRRKKDGDLGQLPLPVPAALLLGPAVESF

SEQ ID NO: 953 - protein, 183 aa, Avena sativa
YRVSIGLPGNGGWCSGWGRGDDGGAANARASVQGRGETWVRRRSGRQGCGGGGGRREEEGAGPAAKAQVVGWPPIRSYRKNTMATSLSAPRSKDEVEAKQAPVAGCLYVKVSMDGAPYLRKVDLKMYKNYKDLSLELEKKFSCFTVGHGESNGKSGRDGLSDCRLMDPKSGAELVLTYEDKDG

SEQ ID NO: 954 - protein, 75 aa, Oryza sativa (japonica cultivar-group)
MASMSVSSSRAPQWTARQNEQFERALAVYDRDTPERWHNIARAVAGKSADEVKLYYDLLVEDVKRIETGKVPFPG

SEQ ID NO: 955 - protein, 334 aa, Malus x domestica
MEEQAQHYTSCCSATMSNISSPHVMPCLTEQWGNLPFQVDDSEDMIVYNSLRDAFSLGWSPDHTFPFQVDDWEDMINNNSDALSLGWSPDHTLECIKPEQAYDLDHLFDQYHDQLPPDLFTQSQPHDFDVSINGNKPSQALVLPPDTDIPPLDHDDRDQNQVQVGDAVAEQEELNVNVPKLQKSGVARGRHYRGVRQRPWGKFAAEIRDPAKNGARVWLGTYETSEEAALAYDRAAFRIRGSKALLNFPHRIGLNEPPPVRVTGKRKEPDQEAAASSSTSSSSSATPTAATKRSKLDKSVSSSADHDHQANVCHTRQKNNTSYMLAIGEQLLVS

SEQ ID NO: 956 - protein, 120 aa, Avena sativa
GSVVGWPPVRSYRRNAMTVQSVKIKKEEETEKQQPASAVAAAAAAATAGGNGSAFVKVSMDGAPYLRKVDLKMYNTYKDLSIALQKMFSTFTATGNEGKMVEAVNGSDVVTTYEDKDGDW

SEQ ID NO: 957 - protein, 255 aa, Petunia integrifolia
MSTSNASTSGVRKGAWTEEEDLLLRECIEKYGEGKWHLVPVRAGLNRCRKSCRLRWLNYLRPHIKGGDFSLDEVDLILRLHKLLGNRWSLIAGRLPGRTANDVKNYWNTHLRKKLIAPHDQKQESKNKAMKITENSIIKPRPRTFSRPAMNHVSCWNGKSCNKNTIDKNEGDTEIIKFGDEKQKPEESIVDGLQWWANLLANNIEIEELVSYNSPTLLHEETAPSVNAESSLTQEGGSGLSDFSVDIDDIWDLLS

SEQ ID NO: 958 - protein, 255 aa, Petunia integrifolia
MSTSNASTSGVRKGAWTEEEDLLLRECIEKYGEGKWHLVPVRAGLNRCRKSCRLRWLNYLRPHIKRGDFSLDEVDLILRLHKLLGNRWSLVAGRLPGRTANDVKNYWNTHLRKKLIAPHDQKQESKNKAMKITENNIIKPRPQTFSRPAMNHVSCWNGKSCSKNTIDKNEGDTEIIKFSDEKQKPEESIDDGLQWWANLLANNIEIEELVSCNSPTLLHEETAPSVNAESSLTQGGGSGLSDFSVDIDDIWDLVS

SEQ ID NO: 959 - protein, 496 aa, Vitis aestivalis
  misc_feature (225)..(238): Xaa can be any naturally occurring amino acid
SDMAEVAQKLEQLEEVIVNAQEDGLSHLASETVHYNPSDLSNWLGSMLSEFNPTPNCALDNPFLPPISPLDYTNCSTQPKQEPSIFDSPSLDYDLKAIPGKALYSHIEQPPQQPPAPPLYQRDNKRLKPTTSATANSVSSVIGGWGVPTESARPVVLVDSQETGIRLVHTLMACAEAVQQENLKLAEALVKQIGFLAVSQAGAMRKVATYFAEGLARRIYRLYPXXXXXXXXXXXXXXHFYETCPYLKFAHFTANQAILEAFEGKKRVHVIDFSMKQGMQWPALMQALALRPGGPPSFRLTGIGPPSTDNTDHLHEVGWKLAQLAETIHVEFEYRGFVANSLADLDASMLELRDGESVAVNSVFELHSLLARPGGIERVLSAVKDMKPDIVTIVEQEANHNGPVFLDRFTESLHYYSTLFDSLEGCGVSPVNTQDKLMSEVYLGQQICNVVACEGPERVERHETLAQWRARLGSAGFDPVNLGSNAFKQASMLLAL

SEQ ID NO: 960 - protein, 272 aa, Ipomoea purpurea
MVNSSARWSPRVRKGAWSEEEDDLLRKCIQKFGEGKWHLVPFRAGLNRCRKSCRLRWLNYLHPDIKRGHFSLEEADLILRLHKLLGNRWSLIAGRIPGRTANDVKNYWHSHLKKKVVSMHMASSNSSRQDNNWDDEKGKAPQIKENILFRPRPRRFFRTSLSSPALSTLTGKAKAVVYDAPPPPPPPPHQLQPQPEATSPAADLLMVFNVQQNSNSIETNLPAQTTAPSSHDGVKWWEDLLYDDSHQGLIDWTTDDDFPIDVDLLKLLDTTI

SEQ ID NO: 961 - protein, 348 aa, Brassica nigra
MLKQESNWAQACDTCRSAACTVYCRADSAYLCTSCDAQIHAANRLASRHERVRVCESCERAPAAFFCKADAASLCTACDSQIHSANPLARRHQRVPILPISGCVATNHHSSETTEPENIVVVGQEEEDEAEAASWLLPSSVKNCGDNNNNTENNRFSVGEEYLDLVDYSSSIDKRFTGQTNQYQQDYNVPQRSYVADGVVPLQVGVSKGHMHHEQHNFQFGFTNVSSEAHQISNGSPIHMVSLVPESVTSDATVSHQRSPKAGTEELPEAPVQMLSPMERKARVLRYREKKKTRKFEKRIRYASRKEYAEKRPRIKGRFAKRNEVDADQAFPTVVMFDTRYGIVPSFS

SEQ ID NO: 962 - protein, 330 aa, Triticum aestivum
MEEVFSSNSKSKAGQMAGEAIAGAEKKPRPKPEQKVECPRCKSGNTKFCYYNNYSMSQPRYFCKACRRYWTHGGSLRNVPIGGGCRKPKRSGTSDAHKLGVASSPEPTTVVPPSTCTGMNFANVLPTFMSVGFEIPSSLSLTAFGSSSSSNTAAMMSPGGTTSFLDVLRGGAGGLLDGSLSQNNGYYYGGPAIGSGNGMLMTPPAVSFGIPVPMQQHGDLVVGGNGIGAATASIFQGATSEEGDDGMGGVMGLQWQPQVGNGGGGGGVSGGVHHLGTGNNVTMGNSNIHNNNNNDSGGDDNNGGSSRDCYWINNGGSNPWQSLLNSTSLM

SEQ ID NO: 963 - protein, 496 aa, Vitis flexuosa
  misc_feature (225)..(239): Xaa can be any naturally occurring amino acid
SDMAEVAQKLEQLEEVIVNPQEDGLSHLASETVHYNPSDLSNWLGSMLSEFNPTPNCALDNPFLPPISPLDYTNCSTQPKQEPSIFDSPSLDYDLKAIPGKALYSHIEQPPQQPPAPPLYQRDNKRLKPTTSATANSVSSVIGGWGVPTESARPVVLVDSQETGIRLVHTLMACAEAVQQENLKLAEALVKQIGFLAVSQAGAMRKVATYFAEGLARRIYRLYPXXXXXXXXXXXXXXXFYETCPYLKFAHFTANQAILEAFEGKKRVHVIDFSMKQGMQWPALMQALALRPGGPPSFRLTGIGPPSTDNTDHLHEVGWKLAQLAETIHVEFEYRGFVANSLADLDASMLELRDGESVAVNSVFELHSLLARPGGIERVLSAVKDMKPDIVTIVEQEANHNGPVFLDRFTESLHYYSTLFDSLEGCGVSPVNTQDKLMSEVYLGQQICNVVACEGPERVERHETLAQWRARLGSAGFDPVNLGSNAFKQASMLLAL

SEQ ID NO: 964 - protein, 502 aa, Oryza sativa (japonica cultivar-group)
MLLIREERDGYNSCPTPPKTTSRHREMTLRTIKVRKSNQSQRHKSQMNKESREKKLDMFTHRKVISDLVSSDVCACVCSTSTRLTANHLVFALRFRSLSVPTPRTPKPINKGARPHAGPSLKHTVSFPPMASLPPPAPPAIGGDPLAATIPPSLPSPAPSSSSLNLSPSLLIITALLAFVFFASVSIHFLLRCLARPSHPAPSPLPRASAAAQRATTASAVEAGEATAASAVGRSHEGEAAAGGGEEVDDEKERLIASLPLFTMASALAALPKSSPDCAVCLSPFAPEAELRLLPACRHAFHASCVDAWLRTTPSCPLCRATVSLPHPPLPTAAAAAASNAAQQDPLDSRSSNNSRSFRVEIGSISNRRSSAAADDRRTYSLGSFDYRVDEEVEAVVSRIARPAAAKSTTGSVTPAPGEALAEAAGSRGWLREYVDRLASSASSLSGRWSGRWSARWSQSHHSNRQEDSWRWDPEAAVMSAPRGVDDDEPGFVTLYRWIVGV

SEQ ID NO: 965 - protein, 348 aa, Brassica nigra
MLKQESNWAQACDTCRSAACTVYCRADSAYLCTSCDAQIHAANRLASRHERVRVCESCERAPAVFFCQADAASLCTACDSQIHSANPLARRHQRVPILPISGCVATNHHSSETTEPENIVVVGQEEEDEAEAASWLLPSSVKNCGDNNNNTENNRFSVGEEYLDLVDYSSSIDKRFTGQTNQYQQDYNVPQRSYVADGVVPLQVGVSKGHMHHEQHNFQFGFTNVSSEAHQISNGSPIHMVSLVPESVTSDATVSHQRSPKAGTEELPEAPVQMLSPMERKARVLRYREKKKTRKFEKRIRYASRKEYAEKRPRIKGRFAKRNEVDADQAFPTVVMFDTGYGIVPSFS

SEQ ID NO: 966 - protein, 200 aa, Meliosma dilleniifolia
GGIVKKARELTVLCDAEVSLIMFSTTGKLSEYISPSTTTKKIFDRYQHISGTNLWNSHYKQMQDNLNKLKEINNSLRREIRQRIGEDLSGLSIEELRGLEQNLDKAEKIVRERKYHVIATQSDTYKKKIRNLEETNSGLLREFEGRAGDPHYVLGGNDGDYEAALGLANGGSHIFAFRLQPTQPNLQDSGAYGLQDLRLA

SEQ ID NO: 967 - protein, 382 aa, Triticum aestivum
MLSGSYVVWNCDRITFSHRKQLMAMITPSSNTTHYRESWYACRYRSGIPGSTSSTPVHTSQHSQPQPLPRLSKLIYLSNHNPPSPFLLGVHSIAGPSSCTSGISWELMGCKSCQKPKAQHRKGLWSPEEDQKLRDFIVRYGHSCWSTVPVKAGLQRNGKSCRLRWINYLRPGLKHGMFSREEEETVMSLHATLGNKWSQIAQHLPGRTDNEVKNYWNSYLKKRVEGARAPAKSAGSDAPRSPMPSDSGRERSTVNQLSNSGSSGPPESSSTADDSSSLTGPGAAALIRPHAPVLPKVMFADWLDMDMDYGTGLMAPRTLDAAFDCSPAQQGASSTVDGRCGAVDSLHGLGDGGICWEFEVDMQGGGAGFCDLLSMSEFLGIN

SEQ ID NO: 968 - protein, 204 aa, Meliosma dilleniifolia
SGGIVKKARELTVLCDAEVSLIMFSSTGKFSEYISPSTSTKKIFDRYQQTSGIILWNSHYESMQDNLNKQKEINNKLRREIRQRIGEDLNDLSIEELRGLEQNLDNSVKLVRERKYHVVTTQSDTYKKKIRNWEEANSNLLREFVSLERRDVDAHYALAGNDGDYEAALGLANGASHVFAFRLQPSQPNLQDGGAYGMRDLRLA

SEQ ID NO: 969 - protein, 270 aa, Zea mays
MHPSAVSFDSGDGRRRGGAQMLLFGGGGSANSNGFFRGVPMAVLAMDDATRVGKRPFFTTHEELLEEEYYDEQAPEKKRRLTAEQVQLLERSFEEENKLEPERKTELARRLGMAPRQVAVWFQNRRARWKTKQLETDYDRLKAAYNALAADHQGLLADNDSLRAQVICLTEKLQGKETSLSATIAAQEVDQPNEHTTGTEKLLAQQLKDDLHSSCGCTGHGALSSEEEDGGVVSDEGCNFDLPDAMFAVGVTNHGAEEAQLANWTSWFWN

SEQ ID NO: 970 - protein, 160 aa, Glycine max
MQKQKLALAKQLNLQPRQVEVWFQNRRARTKLKQTEVDCEYLKRCCETLTEENRRLHKELQELRALKTSNPFYMQLPATTLTMCPSCERVATNSTSTSLSISATINATNSGAMASVKTSNNNNNNDSPSKAIGFPFGKPRFHPFVHSSQQQLHQHQSSAS

SEQ ID NO: 971 - protein, 360 aa, Eschscholzia californica subsp. californica
MKERQRWRAEEDALLRAYVKQYGPREWNLVSQRMNTHLDRDAKSCLERWKNYLKPGIKKGSLTEEEQRLVIRLQAKHGNKWKKIAAEVPGRTAKRLGKWWEVFKEKQQREQKETSKTIDPIEEGKYDQILETFAEKLVKERPNPPLYMGTSNGGYLQSNAATVPPPTLLPPWLSSSSAPPTTSSPPSVTLTLSPSTIAPCTSMSWLQPDRGGNDSNPSLVLGNFPPTHVPVPPSGGDRLMVPDLVECCRELEESHRALVAHKKEAAWRLKRVELQLESEKACRRREKMEEIEMKVRALREEQKVTLDRMEADYRDQLAGLRRDAEAKEQKLADQWAAKHLRLMKFLEQIGCRPPSEPSGR

SEQ ID NO: 972 - protein, 162 aa, Cichorium intybus
VQQLESSRMKLSQLEQELQRARQQGIFISSSGEQSQSTSGNGASSFHVEYSRWLEEQNRRISELREAVSSHAADGELRLIVDGVITHYEDIFRIKNDAAKADVFHILSGMWKTPAERCFLWLGGFRSSELLKLLITQLEPLTEQQLLAINNLQQTSQQAEDA

SEQ ID NO: 973 - protein, 199 aa, Meliosma dilleniifolia
GGIVKKARELSVLCDAEVSLIMFSSTGKLSEYISPSTTTKKIFDRYQHISGINLWNSHYERMQDHLNKQKEINSKLRREIRQRIGEDLTDLTIEELRGLEQNLEKSWNVVRERKYHVLATQTDTYKKKVRNLEEANTNLLREFAGADGDPHYAIVGNDGDHEAALGLANGGSHFFAFRLQPSQPNLQDGVYGLQDLRLA

SEQ ID NO: 974 - protein, 198 aa, Brassica napus
ELAILCDDDVGVIIFSSTGRLYDFSSSSMKSVIERYRDAKCDTNSEMNPASEIKFWQNEAAILKRQLHNLQENHRQMMGEELSGLSVEDLQKLENQLEMSLGDVRMKKEQMLVEEIKELNREGNLVHQENLELHKKVNVMHQQNMELHKKVSEVESVKSADKTSLLTNGLDMGGNSSEHVHLQLSQPQQHDETRSKAI

SEQ ID NO: 975 - protein, 180 aa, Cichorium intybus
NREAARKSRLRKKAYVQQLEASRLKLLHLEQELEQTKAQAALLSGGVNASHLGLPGTTNSGIAAFEMEYEHWVEEQNKKTNALKTALHAPLPDTELDVLVKDTLNHYANLFTIKATAAKVDVCYLISGMWKTSTERLFLWIGRFRPSELLKVLVPQLKLLDQQSHDLCNLIQACQQAEDA

SEQ ID NO: 976 - protein, 272 aa, Oryza sativa
MHIYKEQEAEPSTGLMMPEPAPVASPGSGGSGGSGSVGAEKIGSRGKIEIKRIENTTNRQVTFCKRRSGLLKKAYELSVLCDAEVALVVFSSRGRLYEYSNNSVKETIERYKKANSDTSNASTVAEINAQHYQQEAAKLKQQITNLQNSNRTLVGDNITTMNHRELKQLEGRLDKGLGKIRARKNELLCAEIEYMQRRETELQNDNMYLKSKVAESERGLQTVNMMGSASTSEYVQNMIHYDPRNFLQFNIMHQPQYYPEQEDRKAFMSDER

SEQ ID NO: 977 - protein, 602 aa, Zea mays
APRSDSTSSPTASPSGRATAAMAPAPRRASRRPTPGAGGGGGTCSFRAHPAPPVTQAVSWGAKPEPGGNGAAWERSRAVKRAHEEDAGEEYGGPVVRAKRTRMGGDGDKVWFHRSIAGTVQAAGSGDGHEAEEEKAFLVPSAAAFPHGMSAAAAGPSLAVAKKEEFSKSPSNSPASSGGTDGGSSAVPWPEQLHAQNGAAARVEAMELVVALTACADSVAACNHDAANYYLARLGEMASPAGPTPMHRVAAYFAEALTLRVVRMWPQVFDVSPPRELTDGAVAADDDATALRVLNAVTPIPRFLHFTLNERVLRAFDGHDRVHVIDFDIKQGLQWPGLLQSLATRVAPPAHVRITGVGESRQELQETGARLGRVAAALGLAFEFHAVVDRLEDVRLWMLHVKRGECVAVNCVLAAHRLLRDETGAAVADFLGLTRSTGAAILLLGEHEDALNSGRWEARFARALRYYAAAFDAVEAAGLADASPARAKAEEMFAREIRNAVAFEAADRFERHETFTGWRQRMQEGGFQNAGIGDREALQGRMIARMFAPGNYSVQVQGDGEGLTLRWMDQAMYTVSAWTPVSDGGSTVSASVSTTASHSQHS

SEQ ID NO: 978 - protein, 220 aa, Oryza sativa (japonica cultivar-group)
MALDGKPPVPPPSTPPMDSWACGGRRSKRRGGGGGSSGSSGSSGGGGGGESEEEYLAACLLMLAHGVRDEAEVVGVAAATAKPQHGYECSVCGKVYGSYQALGGHKTSHRKPPSPAAEPAAGEEPSSGGVAGEAKVHRCSICLRTFPSGQALGGHKRLHYEGGAVGDAVKEKNSLKTKAAVATAVLKDFDLNLPAAATTAGDEAESSPPEAKRARLLLLV

SEQ ID NO: 979 - protein, 356 aa, Oryza sativa (japonica cultivar-group)
MAWRPPLPPSSLRTSSSTWRSSKRRRLTTRKNTTTTTTMATMQQQQHHHHLGPPPPPPPHPHNPFLPSSAQCPSLQEFRGMAPMLGKRPMSYGDGGGGGDEVNGGGEDELSDDGSQAGEKKRRLNVEQVRTLEKNFELGNKLEPERKMQLARALGLQPRQVAIWFQNRRARWKTKQLEKDYDALKRQLDAVKAENDALLNHNKKLQAEIVALKGREAASELINLNKETEASCSNRSENSSEINLDISRTPPPDAAALDTAPTAHHHHHGGGGGGGGGGGMIPFYTSIARPASGGGVDIDQLLHSSSGGAGGPKMEHHGGGGNVQAASVDTASFGNLLCGVDEPPPFWPWPDHQHFH

SEQ ID NO: 980 - protein, 150 aa, Oryza sativa
MASPPRIEVEKLSVEQLEALKEQTDLEVNLLQDSLTKIRSAATRLENASAALHDLSLRPKGKKMLVPLTASLYVPGTLDDSEKVLVDVGTGYFIEKTMTEGKEYCERKINLLKSNFDELVEMATKKKNIADEMGRLLQAKLRQSSPSPSS

SEQ ID NO: 981 - protein, 456 aa, Zea mays
  misc_feature (160)..(160): Xaa can be any naturally occurring amino acid
  misc_feature (174)..(174): Xaa can be any naturally occurring amino acid
MVAECHGGGAAAAGGDFLIKLFGMTIPVPECGDAKDIQQSKSNRWTEQDQDSHGLETAPAPAHTDTDTDTSDPSPQPEVVDAEDPTETQQRPGNGDGEGDAAGQREKLKKPDKVLPCPRCNSMDTKFCYFNNYNVNQPRHFCKNCQRYWTAGGAMRNVPXWGAGRRKNKNAAAXHFFQRVRATNATVLSFGGHGGAPPAARLDLDLAEQLSHQLAPVRSAGDAGRPCSEGSSSRDGNGSRSSVDEAAANADDGSVQQHPGPASMNSSGATVWPPYSCAPAPAAYFPQGIAIPIYPAAPAYWGCMVPGAWSLPWPVQHPSSSSSPSPTTTSAPSVVSSSGAADDSSSHALGKRPRDREGDDGRNGGNAKVWAPKSIRIDDVDEVARSSIWSLVGIKGDQTKQQDAADDHAGGHSKQLGTVFEPKRGEATKKAMMTSSPLLHANPVALTRSVAFQEGS

SEQ ID NO: 982 - protein, 342 aa, Triticum aestivum
  misc_feature (181)..(181): Xaa can be any naturally occurring amino acid
  misc_feature (229)..(229): Xaa can be any naturally occurring amino acid
  misc_feature (236)..(236): Xaa can be any naturally occurring amino acid
  misc_feature (280)..(280): Xaa can be any naturally occurring amino acid
  misc_feature (292)..(292): Xaa can be any naturally occurring amino acid
MGMPAVRRRERDAEAELNLPPGFRFHPTDDELVEHYLCRKAAGQRLPVPIIAEVDLYRFDPWALPDRALFGTREWYFFTPRDRKYPNGSRPNRAAGNGYWKATGADKPVAPRGGRTMGIKKALVFDAGKAPKGVKTDWIMHEYRLADAGRAAASKKGSLRLDDWVLCRLYNKKNEWEKMQXPAPGGREVMMVEPNAENTASDMVGTPPPPSLVQSHSHSWGDARTPESXIVDDDPXCSSRRRPSRPRAPPPRRRTQEIDGHADGAQKGSARGARKNQPFXDLSYDDFQSMFXGLQMIPAGERLFYSPFWLPPFRGNNPARRNAARSSKPKTNRQNNITTGEG

SEQ ID NO: 983 - protein, 610 aa, Triticum aestivum
  misc_feature (273)..(273): Xaa can be any naturally occurring amino acid
MCSGPRKPSTPPPAAAAPKDPAAVASLLLELAAADDVVEFRRVVEEEKACLDAAGSWYGPSAVGQGRLAAESRTPAMVAALYGSTAVLAHALSVAPGEACRASGTDGATALHMAAAGGAANAVAATHLLLAAGASTEALSVSGLRAGDLLPRAAGVAEKPLRLLLKSPVVSPSSSPKKSASPPAAMAAAQEPRKEYPPDLTLPDLKSGLFSTDEFRMYSFKVKPCSRAYSHDWTECPFVHPGENARRRDPRRYSYSCVPCPEFRKGGSCRKGXDGCEYAHGVFECWLHPAQYRTRLCKDEVGCARRICFFAHRRDELRSVNPSAVSVGMMQPVSPRSSPPNGMDMGMLNPAGWPSSPVSRLKTARELDFDLEMLALDQYQQKLFDKVSSSAHSPRASWGAPNGGLGSPHAAGSPARNMPDYTDLLGSMDPAMLSQLHALSLKQAGDMSPYSSMPDTPLHMPTSPMVGANNSFGLDHSMAKAIMTSRASAFAKRSQSFIDRGARAPAARSLMSPATTIGEPSMLTDWGSPSGGGNLDWGSPGGKLDWGVQGDELHKFRKSASFGFRGQSAMPAAAPATPAEPDVSWVNSLVKDGHTGDHFPQWLEQEQMVA

SEQ ID NO: 984 - protein, 248 aa, Zea mays
MEPSPQPMGVAAGGSQVYPASAYPPAATVAPASVVSAGLQSGQPFPANPGHMSAQHQIVYQQAQQFHQQLQQQQQQQLQQFWVERMTEIEATTDFKNHNLPLARIKKIMKADEDVRMISAEAPVVFAKACEIFILELTLRSWMHTEENKRRTLQKNDIAAAITRTDIYDFLVDIVPRDEMKEDGIGLPRAGLPPMGAPADAYPYYYMPQQQVPGSGMVYGAQQGHPVTYLWQEPQQQQEQAPEEQQSA

SEQ ID NO: 985 - protein, 285 aa, Arabidopsis thaliana
  misc_feature (230)..(230): Xaa can be any naturally occurring amino acid
RPRANSARGIIISIYSKKKQKKMNSCQQKAMEKLLHGHGCANQLLIMDQTESDSSMEREDLAKSVLHCFSDALSILIDTNDHQDDQSNNSSPQDSSPVLESSRKPLHKRGRKTSMAESSDYHRHESSTPIYHDGFLWRKYGQKQIKESEYQRSYYKCAYTKDQNCEAKKQVQKIQHNPPLYSTTYLGQHICQLHQAYATFPIDTSDFEEHEGSHMIRFGHPNISFSSSTXNLRQHQNHQDRIKDEYMKPVIAEDWSPSQWMSSEVALAVEAFEFNPFWASHDLSS

SEQ ID NO: 986 - protein, 494 aa, Vitis riparia
  misc_feature (225)..(238): Xaa can be any naturally occurring amino acid
SDMAEVAQKLEQLEEVIVNAQEDGLSHLASETVHYNPSDLSNWLESMLSEFNPTPNCALDNPFLPPISSLDYTNCSTQPKQEPSIFDSPSLDYDLKAIPGKALYSHIEQPPQQPSAPPLYQRDNKRLKPTTSATANSVSSVIGGWGVPTESARPVVLVDSQETGIRLVHTLMACAEAVQQENLKLAEALVKQIGFLAVSQAGAMRKVATYFAEGLARRIYRLYPXXXXXXXXXXXXXXHFYETCPYLKFAHFTANQAILEAFEGKKRVHVIDFSMKQGMQWPALMQALALRPGGPPSFRLTGIGPPSTDNTDHLHEVGWKLAQLAETIHVEFEYRGFVANSLADLDASMLELRDGESVAVNSVFELHSLLARPGGIERVLSAVKDMKPDIVTIVEQEANHNGPVFLDRFTESLHYYSTLFDSLEGCGVSPVNTQDKLMSEVYLGQQICNVVACEGPERVERHETLAQWRARLGSAGFDPVNLGSNAFKQASMLL

SEQ ID NO: 987 - protein, 252 aa, Olimarabidopsis pumila
MEGGAALYNPRTVEEVFKDFKGRRAAIVKALTTDVQEFYQQCDPEKENLCLYGLPNEEWEVNLPAEEVPPELPEPALGINFARDGLSEKEWLSLVAIHSDAWLLSVSFYFGSRFSFHKEDRKRLFNMINDVPTIFEVVTGMAKKQSKDKSSSANQNGNKSKSNSKVRTSDGKSSKAMQVKDEDEEVDEEDEDDHGETLCGACGDSDGADEFWICCDLCEKWFHGKCVKITPARAEHIKQYKCPSCSNKRARA

SEQ ID NO: 988 - protein, 496 aa, Vitis rotundifolia
  misc_feature (225)..(238): Xaa can be any naturally occurring amino acid
SDMAEVAQKLEQLEEVIVNAQEDGLSHLASETVHYNPSDLSNWLESMLSEFNPTPNCALDNPFLPPISSLDYTNCSTQPKQEPSIFDSPSLDYDLKAIPGKALYSHIEQPPQQPSAPPLYQRDNKRLKPTTSATANSVSSVIGGWGVPTESARPVVLVDSQETGIRLVHTLMACAEAVQQENLKLAEALVKQIGFLAVSQAGAMRKVATYFAEGLARRIYRLYPXXXXXXXXXXXXXXHFYETCPYLKFAHFTANQAILEAFEGKKRVHVIDFSMKQGMQWPALMQALALRPGGPPSFRLTGIGPPSTDNTDHLHEVGWKLAQLAETIHVEFEYRGFVANSLADLDASMLELRDGESVAVNSVFELHSLLARPGGIERVLSAVKDMKPDIVTIVEQEANHNGPVFLDRFTESLHYYSTLFDSLEGCGVSPVNTQDKLMSEVYLGQQICNVVACEGPERVERHETLAQWRARLGSAGFDPVNLGSNAFKQASMLLAL

SEQ ID NO: 989 - protein, 342 aa, Brassica nigra
MLKQESNWAQACDTCRSAACTVYCRADSAYLCTSCDAQIHAANRLASRHERVRVCESCERAPAAFFCKADAASLCTACDSQIHSANPLARRHQRVPILPISGCVATNHHSSETTEPENIVVVGQEEEDEAEAASWLLPSSVKNCGDNNNNTENNRFSVGEEYLDLVDYSSSIDKRFTGQTNQYQQDYNVPQRSYVADGVVPLQVGVANGHMHHEKHNFQFGFTNVSSEASPIHMVSLVPESVTSDATVSHPRSPKAGTEELPEAPVQMLSPMERKARVLRYREKKKTRKFEKRIRYASRKEYAEKRPRIKGRFAKRNEVDADHALSTMVMFDTGYGIVPSFS

SEQ ID NO: 990 - protein, 190 aa, Gossypium barbadense
MEGSVGYDNDLNLRATELRLGLPGTEPVSIVRSNKRSLQQVADDDCGVNGCRSDDQNETAPPPPKAQIVGWPPIRSYRKNNIQTKKNESEGGGIYVKVSMDGAPYLRKIDLKIYSGYPELLQAIENMFKFTIGEYSEREGYKGSDYAPTYEDKDGDWMLVGDVPWEMFITSCKRLRIMKGSEARGLGCGV

SEQ ID NO: 991 - protein, 302 aa, Glycine max
MECLEAALKSSFRKDMALKQTLFLEEFSSASNVQNVVASSDDLFVDDLLNFSLLENNTNNNNNNEEPDQQLNNHDSTTPQNNQENYNYNPSFNDNNFNTELTVPAEEEVADLEWLSRFVEDSNFSEYSLPFPATVTEKVKVKSPEPGNTAFTFKTPVPAKARSKRTRTGVRVWPLKSPSLAAASSTTTSSSSSSSPSSPQRADSRAKKRAAADGGAARRCSHCGVQKTPQWRTGPLGAKTLCNACGVRYKSGRLLPEYRPACSPTFSSELHSNHHRKVLEMRRKKEDVPEPDTASPPSLPGF

SEQ ID NO: 992 - protein, 342 aa, Brassica nigra
MLKQESNWAQACDTCRSAACTVYCRADSAYLCTSCDAQIHAANRLASRHERVRVCESCERAPAAFFCKADAASLCTACDSQIHSANPLARRHQRVPILPISGCVATNHHSSETTEPENIVVVGQEEEDEAEAASWLLPSSVKNCGDNNNNTENNRFSVGEEYLDLVDYSSIIDKRFTGQTNQYQQDYNVPQRSYVADGVVPLQVGVANGHMHHEKHNFQFGFTNVSSEASPIHMVSLVPESVTSDATVSHPRSPKAGTEELPEAPVQMLSPMERKARVLRYREKKKTRKFEKRIRYASRKEYAEKRPRIKGRFAKRNEVDADHALSTMVMFDTGYGIVPSFS

SEQ ID NO: 993 - protein, 357 aa, Oryza sativa (japonica cultivar-group)
MKVLCSACEAAEARVLCCADDAALCARCDLHVHAANRLAGKHHRLPLLSSSSSSSSPSPPTCDICQDAHAYFFCVEDRALLCRACDVAVHTANALVSAHRRFLLTGVHVGLDAAADDDDKHPPHPLSSSLPRNTAPPPQPPPKRSPSPIYSDDDVIDWATGGHDIGITGNLPDWSLVDEQFNTPALPPVVTKTPPKRASRGPVTAGTAAAVFGNLAGGSPDWPLNEFFGFADFSSGFGFAENGTSKADSGKIGSMDGSPNGGRSSSSSSSSSAAAAGGGGGGQDFFGQVPEVHWAVPELPSPPTASGLHWQRDPRYGGGATDASAVFVPDISSPENPFRCFAAAAAGDHTMKRRRRC

SEQ ID NO: 994 - protein, 345 aa, Brassica nigra
MLKQESNWAQACDTCRSAACTVYCRADSAYLCTSCDAQIHAANRLASRHERVRVCESCERAPAAFFCKADAASLCTACDSQIHSANPLARRHQRVPILPISGCVATNHSSETTEPENIVVVGQEEEDEAEAASWLLPSSVKNCGDNNNNNNNNSENNRFSVGEEYLDLVDYSSSIDKRFTGQSNQYQQDYNVPQRSYVADGVVPLQVGVANGHMHHEQHNFQFGFTNVSSEASPIHMVSLVPESVTSDATVSHPRSPKAGTEELPEAPVQMLSPMERKARVLRYREKKKTRKFEKRIRYASRKEYAEKRPRIKGRFAKRNEVDADHALSTMVVFDTGYGIVPSFS

SEQ ID NO: 995 - protein, 181 aa, Pisum sativum
MGRGKIEIKRIENSSNRQVTYSKRKNGILKKAKEISVLCDAQVSLILFGASGKMHEYISPSTTLIDVLDRYQRASGKTLWDAKHENLSNEIDRIQKENDSMQIELRHLKGEDITSLNYKELMSLEDALENGLTGVRDKKMEVHRMFKRNGKILEDENKELNFLLQQHLALEGVGNMHGQWI

SEQ ID NO: 996 - protein, 200 aa, Aristolochia eriantha
GGIFKKARELTVLCDAEVSLLMFSSTGKLSEYCSPSTTTKKVYDRYQEVTGINLWSSHYEKMQNHLNKLKDENSGLRRAIRQRMGEDLDGLEMEELRGLEQNMDNALKVVRERKYHVIHTQCDTYRKKIRNLEDTNKRFLRALEGRDESGAFLYADSSRPDCESAFGLANGAPHMFGFRLQPCQPNLQDAGYGTHDLRLA

SEQ ID NO: 997 - protein, 514 aa, Ostreococcus tauri
MRARGANARDGTSVVVVRDDGRDDARGAKGQGASGLDAIFAAIPENELRSTDNANEKKMTHEKRTSKRREGERESAEARAKTNAAASTPVVSQRRGEEGRKATAKVDAKGKAREPLPKPEYTPQCPRCKSEDTKFCYYNNYNIKQPRFYCKECCRYWTEGGLLRNVRVGAGRRKSKSAKDKEAANTVTDKPAVGDDALGAKRSRRTGDDNRGREKSARNQKRDGSSDGSATEAEQGEGTFEYARGFPHGSNTGSDTAVRGRSPPEEQGSAEGEGSQRPGDHMRFLGGWGIDPSVARYVSTGLLPPNDDAIQAQAAAAAAASAAILNEATRWGMHFWNKQSTFPYNMPSSSSTSTMSEFPGNAQVGRGGVPTPIALAALKCERVAQPTPLHPTAAAAASTYGTVPRTQGTTTPTTAVMPSSPMAMQYVSMFQNPWAQFCVHSDKGNKCLTSKWRTLCSYTEECSPRSEVFQARRSHSRVHNHSSRKVKAKQSPLSEDKTLANNLQNVEYRCDANI

SEQ ID NO: 998 - protein, 407 aa, Oryza sativa
LIGKEKAKHIATPTSINTSTILPHPPRLRPPPRPQLRRRRLSPPRQCATIPRRRRRTSPPPWARSTRRSPPPRALPPTVEAAGAPSPRCWGSRPPRRWSSFFPPPPPPRRRPRPRSPPTRTSSTAQPGSPRSPPLRRPPPAASSSPSPSSSSKRKPDPASKGKAAAKKGKTAASGEDGGDGGEDEKPAYVHVRARRGQATDSHSLAERARREKINARMELLKELVPGCTVSVRSKGTLGVQQRVMPSVGVQQQQHVVAPFFISKTEVSGTALVLDEIINHVQSLQRQVEYLSMRLAAVNPRVDFGGLDNFLTTECGRITGLNYKNGMDLEQVTWPDMGVHGARNLMQLQQQFWHGDLAHPLQPPSQWEKRTDTNPPVFSNSSSSLFGYDLASSGAPAQTGNKLKTEL

SEQ ID NO: 999 - protein, 201 aa, Saruma henryi
GGIFKKARELTILCDAEVSLIMFSSTGKFSEYCSPSTTTKKIFDRYQQVSGINLWSSHYEKMQNHLNKLKDDNNKLRREIRQRIGEDLSDLEIEELRGLEQNLESSLKVVRDRKYHVINTQTETYKKKIKSLQQSHLNLIHAMEGKDHENGDYGLADNSGPDFESALGLANGASHIFAFRVQPCQPNLHDAGYGTHDLRLA

SEQ ID NO: 1000 - protein, 201 aa, Thottea siliquosa
SGIFKKARELTVLCDAEVSLIMFSSTGKLSEYCSPSTTTKKMYDKYQEVSQINLWSSHYEKMQAHLNKLKEDNSNLRKEIRQRMGENLNGLHMEELRGLEQNMDLALKVVRERKYHVIQTQCDTYKKKIRNLEDTNKRFIRALEGRDENGELLFADGSGLDYESALALSSGGANLFAFRLQPFQPNLHDDAGYGTQDLRLA

SEQ ID NO: 1001 - protein, 439 aa, Arabidopsis thaliana
MLSNKNTNTCCVVSSSSSDPFLSSSENGVTTTNTSTQKRKRRPAGTPDPDAEVVSLSPRTLLESDRYICEICNQGFQRDQNLQMHRRRHKVPWKLLKRDNNIEVKKRVYVCPEPTCLHHNPCHALGDLVGIKKHFRRKHSNHKQWVCERCSKGYAVQSDYKAHLKTCGTRGHSCDCGRVFSRVESFIEHQDNCSARRVHREPPRPPQTAVTVPACSSRTASTVSTPSSETNYGGTVAVTTPQPLEGRPIHQRISSSILTNSSNNLNLELQLLPLSSNQNPNQENQQQKVKEPSHHHNHNHDTTNLNLSIAPSSSYQHYNNFDRIKEIMASEQIMKIAMKEKAYAEEAKREAKRQREIAENEFANAKKIRQKAQAELERAKFLKEQSMKKISSTIMQVTCQTCKGQFQAVAVPAATADETSLVVSYMSSANTDGELENGF

SEQ ID NO: 1002 - protein, 650 aa, Arabidopsis thaliana
MTPATQYPCDPEGVCMRCKSMPPPEESLTCGTCVTPWHVSCLLSPPETLSATLQWLCPDCSGETNPLPVSGVAAGYGSVGSDLVAAIHSIEADETLSAEEKAKKKQQLLSGKGVVDEDDEEEKKKTSKGKKPIDVLSHFECSFCMQSLQKPVSVRVLFALALMLVWFLESTPCGHNACLKCFLKWMGQGHRSCGTCRSVIPESMVTNPRINLSIVSAIRLARVSEKADARTSKVVHYVDNEDRPDKAFTTERAKKTGNANASSGKIFVTIPRDHFGPIPAENDPVRNQGLLVGESWKGRLACRQWGAHFPHVSGIAGQASYGAQSVVLAGGYDDDEDHGEWFLYTGRTNTVQAFDQVFLNFNEALRLSCKLGYPVRVVRSTKDKRSPYAPQGGLLRYDGVYRIEKCWRIVGIQMCRFLFVRCDNEPAPWTSDEHGDRPRPLPNVPELNMATDLFERKESPSWDFDEGEDRWRWMKPPPASKKAVKNVLDPEERKLLREAIKSANPNTMRARLLKEFKCQICQKVMTNPVTTPCAHNFCKACLESKFAGTALVRERGSGGRKLRSQKSVMKCPCCPTDIAEFVQNPQVNREVAEVIEKLKKQEEEENAKSLDEGQCSGTSHEEEDDEQPKKRIKLDTDAEVSATVVESDMK

SEQ ID NO: 1003 - protein, 698 aa, Solanum demissum
MSLNRTCNSSFWTKEEDKAFENALAVFSGDNDKFLKIAAAVPGKSLQEIIDHYNVLVEDINDIESGKVPLPKYERMQSSSSCRRRSLGAGVERRKGLPWTAEEHRSFLQGLAKHGKGDWRGISRNFVFSRTPTQVASHAQKYYSRLNDNNAKRRKSIHDVTSVGAANITEPSQGQKSDELTGPCGGQSQWPIADYVTEAFDTGMLSLPGSVTNCTTDAIEGPSAVNPEKFPLVAALGSELNSSFPGVDEFLQSVEDLIIVPAEGTSGVCHGVDTRTSPSLSVQPSVTGGTGMYTHPVSFPDVHEFLQEVEDLITVPAEGTSGACHGIDTRTSPSLSLQSSVAGGTRMYTHSVTVPAEGTSGVRCGIDTRTSPSLSLQPSVAGGTRMYPHPVNVLAEGTSGASHGVDTRTSPSLSLQPSVAGGSRIYPHPVNVPAEGISGVSHGVDTRTSPSLSLQPSVGGGTGMYTHPVTVRVEGTSGARRGVDTRTSPSLSLQPSVVGGIGMYTHPIIVPAEGTSGTRRGVDTRTSPSLSFQPSVGGGTGMYTHPVTVLAEGTSGVRCGVGTRTSPSLGLQPSVAGGTRMYTHAVNNVGYDLEELMTKQLVGASQEGPSINTASLPSPIADHIGLHGCTTSSSVAKNGFVSTMEAPGGGFSVDSMQTPSIPGHIGGGTYPCWEPSSKDDSIFDLEYLYTDHMFGFRK

SEQ ID NO: 1004 - protein, 495 aa, Vitis thunbergii
  misc_feature (224)..(237): Xaa can be any naturally occurring amino acid
DMAEVAQKLEQLEEVIVNAQEDGLSHLASETVHYNPSDLSNWLGSMLSEFNPTPNCALDNPFLPPISPLDYTNCSTQPKQEPSIFDSPSLDYDLKAIPGKALYSHIEQPPQQPPAPPLYQRDNKRLKPTTSATANSVSSVIGGWGVPTESARPVVLVDSQETGIRLVHTLMACAEAVQQENLKLAEALVKQIGFLAVSQAGAMRKVATYFAEGLARRIYRLYPXXXXXXXXXXXXXXHFYETCPYLKFAHFTANQAILEAFEGKKRVHVIDFSMKQGMQWPALMQALALRPGGPPSFRLTGIGPPSTDNTDHLHEVGWKLAQLAETIHVEFEYRGFVANSLADLDASMLELRDGESVAVNSVFELHSLLARPGGIERVLSAVKDMKPDIVTIVEQEANHNGPVFLDRFTESLHYYSTLFDSLEGCGVSPVNTQDKLMSEVYLGQQICNVVACEGPERVERHETLAQWRARLGSAGFDPVNLGSNAFKQASMLLAL

SEQ ID NO: 1005 - protein, 246 aa, Arabidopsis thaliana
MGPMIRTEEEEDYTSPPWLMPMLRGSYFVPCSIHVDSNKNECNLFCLDCAGNAFCSYCLVKHKDHRVVQIRRSSYHNVVRVNEIQKFIDIACVQTYIINSAKIVFLNERPQPRIGKGVTNTCEICCRSLLDSFRFCSLGCKLGGMRRGDLSLTFSLKGKHGREYLGGSESDEATTPTKMRKTNAFNRLMSGLSISTVRFDDYGPNGDQRSSSSGDEGGFSFSPGTPPIYNHRNSSRRKGVPHRAPF

SEQ ID NO: 1006 - protein, 345 aa, Brassica nigra
MLKQESNWAQACDTCRSAACTVYCRADSAYLCTSCDAQIHAANRLASRHERVRVCESCERAPAAFFCKADAASLCTACDSQIHSANPLARRHQRVPILPISGCVATNHSSKTTEPENIVVVGQEEEDEAEAASWLLPSSVKNCGDNNNNNNNNSENNRFSVGEEYLDLVDYSSSIDKRFTGQSNQYQQDYNVPQRSYVADGVVPLQVGVANGHMHHEQHNFQFGFTNVSSEASPIHMVSLVPESVTSDATVSHPRSPKAGTEELPEAPVQMLSPMERKARVLRYREKKKTRKFEKRIRYASRKEYAEKRPRIKGRFAKRNEVDADHALSTMVVFDTGYGIVPSFS

SEQ ID NO: 1007 - protein, 190 aa, Triticum aestivum
  misc_feature (106)..(106): Xaa can be any naturally occurring amino acid
  misc_feature (127)..(127): Xaa can be any naturally occurring amino acid
MESPMAARRLLQEAAGLSTPGARIIADDRDIVIILASLLCALITVLGIGLVARWCACGGAEARARAAANRGVKKSVLRAIPTVAYVSADAGKGKGKEAEEARRGAXCAICLAEFEDGEAMRVLPQWXHAFHAACVDKWLRGHSSCPSCRRILAVQLPAAQRCQRCGARPDPAVATWKPPAQYGEMPPFLP

SEQ ID NO: 1008 - protein, 200 aa, Oryza sativa (japonica cultivar-group)
MDGESSLFEGESAPPDYAKKAMPADRLAELALLDPKRAKRILANRQSAARSKERKIKYTGELERKVQTLQTEATTLSTQLTLLQRDTSGLTAENRELKLRLQSMEEQAKLRDALNDALREEVQRLKIAAGQVPNMNGNSFNGGLQQQQQQQMPTYFSQQQQMHYLSGHQGRHHHPNNPHNSLNGGQSMSGQTLNDSMDFM

SEQ ID NO: 1009 - protein, 502 aa, Leea indica
  misc_feature (229)..(244): Xaa can be any naturally occurring amino acid
SDMAEVAQKLEQLEEVIVNAQEDGLSHLASETVHYNPSDLSNWLESMLSEFNPNPNCPLDNPFLPPISQSSTISSLDYANCSTQPKQEPPLFDSPSSDYDLKAIPGKALYSHIEQPPQPPPPPLYQRESKRLKPTTSATPSSVSSVAGGWGVATTDSPRPVVLVDSQETGIRLVHTLMACAEAVQQENLKLAEALVKQIGFLAVSQVGAMRKVATYFAEGLARRIYRLXXXXXXXXXXXXXXXXHFYETCPYLKFAHFTANQAILEAFEGKKRVHVIDFSMKQGMQWPALMQALALRPGGPPSFRLTGIGPPSTDNTDHLQEVGWKLAQLAETMHVEFEYRGFVANSLADLDASMLELRDGESVAVNSVFELHGLLARPGGIEKVLSAVKDMKPEIVTIVEQEANHNGPVFLDRFTESLHYYSTLFDSLEGCGMSPVDSQDKLMSEVYLGRQICNVVACEGAERVERHETLAQWRARLGSAGFEAVHLGSNAFKQASMLLAL

SEQ ID NO: 1010 - protein, 345 aa, Brassica nigra
MLKQESNWAQACDTCRSAACTVYCRADSAYLCTSCDAQIHAANRLASRHERVRVCESCERAPAAFFCKADAASLCTACDSQIHSANPLARRHQRVPILPISGCVATNHSSKTTEPENIVVVGQEEEDEAEAASWLLPSSVKNCGDNNNNNNNNSENNRFSVGEEYLDLVDYSSSIDKRFTGQSNQYQQDYNVPQRSYVADGVVPLQVGVANGHMHHEQHNFQFGFTNVSSEASPIHMVSLVPESVTSDATVSHPRSPKAGTEELPEAPVQMLSPMERKARVLRYREKKKTRKFEKRIRYASRKEYAEKRPRIKGRFAKRNEVDADQALSTMVVFDTGYGIVPSFS

SEQ ID NO: 1011 - protein, 329 aa, Oryza sativa (indica cultivar-group)
MVEAELPPGFRFHPRDDELICDYLAPKVAGKVGFSGRRPPMVDVDLNKVEPWDLPGVASVGGKEWYFFSLRDRKYATGQRTNRATVSGYWKATGKDRVVARRGALVGMRKTLVFYQGRAPKGRKTEWVMHEYRMEGVHDQQASSFSSKEDWVLCRVICKRKSGGGATSKSRSLTTTTTTIVHDTSTPTSSPPLPPLMDTTLAQLQASMNTSSSSAAIAAVAALEQVPCFSSFSNSIASNNNNNNNSNSATVNAQQCYLPIVTGSNNNGMSYLDHGLPDFGSFLDTQSCDKKMLKAVLSQLNSIGGEVLPGLPPPSEMAAAVSSSWMNHF

SEQ ID NO: 1012 - protein, 135 aa, Brassica napus
GSFLRGLDVNRAPSRVVVDVGEDAGVSCPNSTVSSVMSGKRNERELVAAAGTGGGRTIEDNEAERGSSSLGGGSDDEDGGGNGDDGSRKKLRLSKEQAWFLEETFKEHSTLNPKQKMALAKQLNLMTRQVEVWFQ

SEQ ID NO: 1013 - protein, 242 aa, Populus tremuloides
MGRGRVQLKRIENKINRQVTFAKRRNGLLKKAYELSVLCEAEVALIIFSNRGKLYEFCSGSSMLKTLERYQKCNYGAPEPNVSAREALELSSQQEYLKLKARYEGLQRTQRNLLGEELGPLSSKDLESLERQLDMSLKQIRSTRTQYMLDQLNDLQHKEHMLTAANKSLKERLMEGYQLNSLQLNPSAEDVEYARQQAQPQGDGFFHALECEPTLQIGYQPENITMVTAGPSMTTYMPGWLA

SEQ ID NO: 1014 - protein, 191 aa, Asimina triloba
SKRRAGITKKAKELTVLCDAEVCLIMFSGTGKFSEYCSPSTTTKKTFDRYQQVSGINLWESHYEKMQTHLIKLKEDNSRLRREIRQRIGEDLDDLELEQLRGLEQNIESSVKAVRERKYHVISTQTETYKKKIRNLHEAHANLIRQLEGLADNSGYGLVDDGADYEAVLALANGTHNLHDAGFGIHDLRLA

SEQ ID NO: 1015 - protein, 230 aa, Platanus x acerifolia
LVSVSRPLIMSSQTNMLDMLKQTGRPEMVVGWYHSHPGFGCWLSGVDINTQQSFEALNQRAVAAVVDPIQSVKGKVVIDAFRLINPQTMMPGQEPRQTTSNVGHLNKPSIQALIHGLNRHYYSIAINYRKNELEEKMLLNLHKKKWTDGLMLQRFDTHSKTNEQTVQEMLSLAIKYNKAVQEEDELPPEKLAIANVGRQDAKKHLEEHVSNLMSSNIVQTLGTMLDTVVF

SEQ ID NO: 1016 - protein, 289 aa, Glycine max
  misc_feature (24)..(24): Xaa can be any naturally occurring amino acid
MGEKDDDFGLSLSLSLGRVNQQQXTLLLNHMHQPQQLQPVPMNHNKTLFGDLFQLPDRSSEMVRGIDVNSAAEYDGVSSPNSAVSSVSGGGKQSERDDDNAAAVAGERTSCSRGSDDDDGGGSDAARKKLRLTKEQSMVLEETFKEHNTLNPKRKQALAEELNLKPRQVEVWFQNRRARTKLKQTEVDCEYLKKCCENLTEENRRLHKEVQELRALKLSPQMYMHMNPPTTLTMCPSCERTHSSASSSPATIHSTVAAATSSNCKLLGANIRRPVPVNTWPFEGPIPRP

SEQ ID NO: 1017 - protein, 292 aa, Oryza sativa (japonica cultivar-group)
QKWTAEEESALKAGIAKHGAGKWRTILKDPDFSNVLRYRSNVDLKDKWRNMNVTVNASGARDRVKAPVVKKPRSAPKHEGHSTSTAIAAVTSDGDDDVAEPVPLATSTSSKRSLSRLDNIIVEAVRSLNEPTGSYKTAIANYIEEQYWPPADFDHVLSSKLNDLTASGKLIKVNRKYRIAPSSSLSEGRSSKVVLLEDIKKEPTKLDREDVAVLTKSQIDAELARMRTMTAEEAAAAAARAVAEAEAIMAEAEAAVREAEAAEADAVAAQAFAEAAMATFKNRSSAKLIIRA

SEQ ID NO: 1018 - protein, 570 aa, Oryza sativa
  misc_feature (233)..(233): Xaa can be any naturally occurring amino acid
  misc_feature (263)..(263): Xaa can be any naturally occurring amino acid
  misc_feature (271)..(271): Xaa can be any naturally occurring amino acid
MGRSRGVPNSGDDETNHRSKRRRVASSGDAPDSLSAACGGAGEGGGKKALYHCNYCNKDISGKIRIKCSKCPDFDLCVECFSVGAEVTPHRSNHPYRVMDNLSFPLICPDWNADEEILLLEGIEMYGLGNWAEVAEHVGTKTKAQCIDHYTTAYMNSPCYPLPDMSHVNGKNRKELLAMAKVQGESKKGTSVLPGDLTPKDESPFSPPRVKVEDALGEGLAGRSPSHIAGGAXKKASNVGQFKDGANVAKVEDGHVDRSIGVXKPRYSADXGPSLTELSGYNSKRHEFDPEYDNDAEQALAEMEFKETDSETDRELKLRVLRIYLSRLDERKRRKEFILERNLLFPNPLEKDLTNEDKEVYHRYKVFMRFLSKEEHEALVRSVLEERKIRRRIQELQECRSAGCRTLAEAKIHIEQKRKKEHEVNAQKAKESGQLLSNTKVVHKTNRPMKIESDGNLDQKKGGASLDSTGRDSPKTTGHAGTKHWDDWDIVGFPGAELLSTSEKNLCCQNRLLPNHYLKMQEVLMQEIFKGSVAKKEDAHVLFKVDPAKVDNVYDMVTKKLGTNEEAPTV

SEQ ID NO: 1019 - protein, 200 aa, Drimys winteri
GGIFKKARELTVLCDAEVSLIMFSSTGKFCEYCSPSTTTKKIFDRYQQVSGTNLWNTQYEKMQSNLKKVKEDNNKLRKEIRQRMGEDLNDLEIEEMRGLEQNLESSLKVVRERKYHVINTQTETYKKKLKSSHEAHGNLLAALDGRDENGDYMTGDNGGSDYEPGIGMANGGSHIFAFRVQPYQPNLHDPSYGIHDRIRS

SEQ ID NO: 1020 - protein, 204 aa, Drimys winteri
SKRRGGIFKKARELTVLCDAEVSLIMFSTTGKFFEYCSPSTTTKKIFDRYQQVSGINLWNTQYEKMQGHLSKLKEVNNKLRKEIRQRMGEDLNDLEIEEMRGLEQNLESSLKVVRERKYHVINTQTDTYKKKLRSLHEAHGNLLAALEGRDENGDYMTGDNGGPDYEPGIGMANGGSHIFAFRMQPYQPNLHDPSYGIHDLHLA

SEQ ID NO: 1021 - protein, 250 aa, Zea mays
  misc_feature (93)..(93): Xaa can be any naturally occurring amino acid
  misc_feature (100)..(100): Xaa can be any naturally occurring amino acid
MMRETYMDVLPPVDHIAASRSGGWFPGAARLWTAAENKQFERALAGLDLCRPDWEKVARAIPGRTVREVVSHFKSLQVDVQQIESGLVPMPVXYGAGAGXGSFTLQWDGCYGPADSRHNGYRFGSGGCGRRHHGRTPEQDRKKGVPWTEEEHRLFLLGLKKYGKGDWRNISRNYVQTRTPTQVASHAQKYFIRLNKKRSSIRDTTTVNLTDDQPTSPSQSSLITDQFSALALATDVNQNSRANSPSIELA

SEQ ID NO: 1022 - protein, 180 aa, Arabidopsis thaliana
  misc_feature (160)..(160): Xaa can be any naturally occurring amino acid
MSPPSTIAYVLPPGFKFVPNDEEVIHCYLKPYSDGNTNVLLHVPIHLVNIYESNPQTLSEEFQKGNDKEWFIITERNKVDQGLSQTKRVGYGAKRQKRVDTNGGYWHATVAAQKINAGDGVVRNKRPLAYYVGKPSEGVKTDWLMQEYSLDHSSHNNDKXAPVEALEEQLPCNVEYHQPL

SEQ ID NO: 1023 - protein, 128 aa, Glycine max
MQSQQTVKEEDDEGPPPGWQPLPAQPPPPPRPSGWAQMVCGSCRRLLSYPRGAKHVKCSCCQTVNIVLEADQVGQVKCGSCAVLLMYPYGASQVRCSSCRFVTEIGAHNKRPPWSVQQRKPSPPKTGC

SEQ ID NO: 1024 - protein, 239 aa, Triticum aestivum
MAVEAVLEAATMIPSPPSKEMEASSSTSEEASALLGQAEGWSKRKRSRRQRALDPSEEEYLALCLLMLAHGHRDSAPAAAPEQQHGCSVCGKVFASYQALGGHKASHRKPTAAPAGAEDQKPLAAVAAASSSGSGEAAVSAGGGKVHECNVCRKTFPTGQALGGHKRCHYDGTIGSAAAGPTQKLAAKAAAASATAASQGFDLNLPALPDIPERCAVTEDGEEVLSPASFKKPRLMLAA

SEQ ID NO: 1025 - protein, 345 aa, Brassica nigra
MLKQESNWAQACDTCRSAACTVYCRADSAYLCTSCDAQIHAANRLASRHERVRVCESCERAPAAFFCKADAASLCTACDSQIHSANPLARRHQRVPILPISGCVATNHHSSETTEPENIVVVGQEEEDEAEAASWLLPSSVKNCGDNNNNNNNSENNRFSVGEEYLDLVDYSSSMDKRFTGQSNQYQQDYNVPQRSYVADGVVPLQVGVANGHMHHEQHNFQFGFTNVSSEASPIHMVSLVPESVTSDATVSHPRSPKAGTEELPEAPVQMLSPMERKARVLRYREKKKTRKFEKRIRYASRKEYAEKRPRIKGRFAKRNEVDADHALSTMVVFDTGYGIVPSFS

SEQ ID NO: 1026 - protein, 295 aa, Pichia angusta
MFKLLSFANAPAIVRANQKDSYFESRLHNQLLDVVKAIKGSHFVHKYPEELRTLATALYLCLTTLVGSKTLGEEYVDLVYVSRDGRKIPKFASRFGFVVAYVLFPYAVRQLLQKLKAQQSRLAQLVSGVSYMNVMDLLNLHLALFYFTGKYYQFAKRLFGLRYAFGYRVDKNQQRARGNYELLGLLIIFQTVFKNVANLRKLWGATKTVQDSGDLIYRFRDQTSDVIDLADPKVLPYLPEASRTCMLCLSPMKDPSCGECGHVFCWKCVLDWVKERQECPLCRAKMRESQLLPLR

SEQ ID NO: 1027 - protein, 419 aa, Pichia pastoris
MPPSEEIKLRAVSPRPDFKANYLEFANAPAIVRANQKDSYFETVLRDKLQNVIQIFKGQRFTHTHPEEIGVAAKALYLSLTTLLGTKTLGEEYVDLIYVSRDGKRIPRYLARAGFIFAYAILPYFLTRLFRRLKSSSTPKDEVTEEKINKELPISLRIEKYLSNMSYSKVLDTIMNLHIAVFYFSGQFYNISKRFFSMRYAFGHKINKERTPNGNYELLGGLIVLQLVMKSLGGFKGLIGSFTGNDEHDESNLRANNKDIMYGIPSEEEQEEAKQQLGIIDLSDPGQLPYIPESSRQCMLCLSYMTNPTAANCGHCFCWSCIIDWCKERQTVLCVGKKCWNSNCYHCIRLFYIPTLNKICFFFLLSFLSVRAASKEFKSTKEEFAELFNEELADIAGEDPHCPGPFPTGRTLGYFLVVF

SEQ ID NO: 1028 - protein, 348 aa, Brassica nigra
MLKQESNWAQACDTCRSAACTVYCRADSAYLCTSCDAQIHAANRLASRHERVRVCESCERAPAAFFCKADAASLCTACDSQIHSANPLARRHQRVPILPISGCVATNHHSSETTEPENIVVVGQEEEDEAEAASWLLPSSVKNCGDNNNNNNNNNISENNRFSVGEEYLDLVDYSSSIDKRFTGQTNQYQQDYNVPQRSYVADGVVPLQVGVANGHMHHEKHNFQFGFTNVSSEASPIHMVSLVPESVTSDATVSHPRSPKAGTEELPEAPVQMLSPMERKARVLRYREKKKTRKFEKRIRYASRKEYAEKRPRIKGRFAKRNEVDADHALSTMVMVDTGYGIVPSFS

SEQ ID NO: 1029 - protein, 274 aa, Arabidopsis thaliana
MGFDDTCNTGLVLGLGPSPISNNYNSTIRQSSVYKLEPSLTLCLSGDPSVTVVTGADQLCRQTSSHSGVSSFSSGRVVKRERDGGEESPEEEEMTERVISDYHEDEEGISARKKLRLTKQQSALLEESFKDHSTLNPKQKQVLARQLNLRPRQVEVWFQNRRARTKLKQTEVDCEFLKKCCETLADENIRLQKEIQELKTLKLTQPFYMHMPASTLTKCPSCERIGGGGGGNGGGGGGSGATAVIVDGSTAKGAFSISSKPHFFNPFTNPSAAC

SEQ ID NO: 1030 - protein, 204 aa, Drimys winteri
SKRRVGIFKKARELTVLCDAEVSLIMYSSTGKFCEFCSPSTTTKKIFDRYQQVSGINLWNTQYEKMQGNLDKLKENNNKLRKEIRQRMGEELNDLEIKELRCLEQNLESSLKAVRERKYHVIITQTETYKKKLRSVHEAHGNLLASLEGRDENGDYMTGDNGGPDYEPAIGMANEGSHIFAFRVQPFQPNLHDPSYGIHDLHLA

SEQ ID NO: 1031 - protein, 200 aa, Drimys winteri
GGIFKKARELTVLCDAEVSLIMFSSTGKFCEYCSPSTTTKKIFDRYQQVSGTNLWNTQYEKMQSILKKVKEDNNKLRKEIRQRMGEDLDDLKIEELRGLEQKLESSVKVVRERKYHVINTQTETYKKKLRSLHEVHANLLRELDGRDENEEYMLGETRGPDYESAIGMANGGSHIFAFHVQPCQPNLQDNGYGCHELRLA

SEQ ID NO: 1032 - protein, 151 aa, Arabidopsis thaliana
  misc_feature (132)..(132): Xaa can be any naturally occurring amino acid
MMMRAEEDNYNLNPPPWLIPMLRANYFIPCSIHAASNKSECNMFCLDCSSEAFCSYCLLNHRNHRVLQIRRSSYHNVVRVNEIQKYIDISCVQTYIINSARIVFLNERPQPRIGKGVTNTCEICCRSLLDSXRFCSLGCKVTLSFLWFPLF

SEQ ID NO: 1033 - protein, 369 aa, Medicago truncatula
MGRHSCCYKQKLRKGLWSPEEDEKLLNYITKHGHGCWSSVPKLAGLQRCGKSCRLRWINYLRPDLKRGAFSQQEENLIIELHAVLGNRWSQIAAQLPGRTDNEIKNLWNSCLKKRLRQSGIDPNTHKPLSEVENDNEKSLTSNKTNQKGSVSSNEVMSLMIEPTKPSIEGYPLEVSTTSKINNSSSSSHELFLDTRFGSSSSYFSFQNLNYGSNIGISENPNASSICFTPTSTSSQIMSDTNSVITSNMLHSVSPSIFSTPTHVKPTVSVSSVDGVHNWEASSYNNINNTNNGALPLQEEMKWSEYLNTPFLMQNQPSPSMYTEAKPETGFITDESCTSWQQQQQQNFQLSDIYSKDLQRFSVAFGQSM

SEQ ID NO: 1034 - protein, 1088 aa, Debaryomyces hansenii CBS767
MSYNPYRLRNYGGGYSNNGYRQRHYYSDYNESSYNSSYRDQYDRNGSYSGSKGRHYNSGTSRNAPPPSSSAYSSDSSSRTYANSSSSGPAKIPVGPKSLTIDGSTNGDLPTAGTQKHNIPPTNAISGTDATTGVNPNDSNFTQLLLHQDLLKQIEFSGEIDSKRNYKVIYDPELDKSLSKAERKTKQKKIRFNGESLSSHDVTDPRKSSTGSTSAYFLKPNKKSKKFPFKQLPQPKFIYDKDSLGPPPQNEIVVWDLPSTTSEVYLSNFFKSYGDSIKDLKFINDPLNAVPLGIATCKFQGNPDKSMRIAKKFIANVRINHTKIDGAELKIALNDNDNKLLDDKIKVAQDKLRISRIKIEEEEKKRLKKQQAIEDQKRRETEKAAKEKKLQESANSSHESRFKPNTTTLSIRHHNEVIPGVFLPRELRKYIRDRPYIFINDKYVPTRKVSSQDIKKVLNKYDWTRVLPDRSGFFVVFNSIKECERCFINEDGRKFFEYKMFMELALPENFNESSSLTSNNDNTDLSASNRKQNDVVEEASNMLIKEFQNFLAKDIRERVIAPVVLDLLSHDKYPKLVEELKAKELATKKAASPIVTNAVRQVKLKPNVLSSLAIKSKPQAILPSFRKKKDLPNAGLNSANKAKKNVIPMQHALNYDHESDESDEDDSTRSTTPLTPTLKRERSPTVSSVSNDNDIEDKLEDIQKPLKKKQKKTKLHQSFLYDSASDEDMEAVSEEKEVEKDESEGEEDIDYSHIDKIYQPTEDYPRPVYEEVPRFPSDPLDLDALQSIIKDDEDITLLQTALADVTSESNIKNMEYWAWKQKDIKAKAGVQEISEDLEVIGPLDSRFDSKSGAFKSEGYRKIPDADKIEYLPHRRKIHKPIKTIQHDDDELNANNSTTNNNSNNIQSSRVNRANNRRFAADISAQKQMLGSETDILNLNALTKRKKPVSFARSAIHNWGLYALEPIAAKEMIIEYVGESIRQQVAEHRERSYLKTGIGSSYLFRIDENTVVDATKKGGIARFINHCCNPSCTAKIIKVEGKKRIVIYALRDIEANEELTYDYKFEKETNDAERIRCLCGAPGCKGYLN

SEQ ID NO: 1035 - protein, 397 aa, Zea mays
  misc_feature (58)..(58): Xaa can be any naturally occurring amino acid
  misc_feature (84)..(84): Xaa can be any naturally occurring amino acid
  misc_feature (132)..(132): Xaa can be any naturally occurring amino acid
  misc_feature (154)..(154): Xaa can be any naturally occurring amino acid
  misc_feature (173)..(173): Xaa can be any naturally occurring amino acid
  misc_feature (305)..(306): Xaa can be any naturally occurring amino acid
  misc_feature (318)..(318): Xaa can be any naturally occurring amino acid
  misc_feature (343)..(343): Xaa can be any naturally occurring amino acid
MSSSSASLQPPPAGATGGSSPYSASSSFLPSFMIIAALLAFVFLASVSIHLLLRFLSXALPPPPPPPPPPRRCPDIRARGPTAXDAGSADASVARRPAATAAPADAGKNEEEEDAGDEKQRLIDSLPLFTMXSALAALPKSSPDCAVCLSPFTXDADLRLLPACRHAFHAACXDAWLRTTPSCPLCRAAVALPHPSLSGMLAAAQAQRPARPGPGPGPSFLVEMGTVSSRGSPAAAGGGRDRNRNRNSRTYSLGSAFDYQIDEEVEAVVSRVARIAAARESSAVKEEKPSAEQGSAPAPAPAPSXXSQPPPPGETVAXAAGSSRGWLREYVDRLASSAYTLSXRWSSRWSQGQSQQQRQEEPWLWDAEAAEMSAAPGSDDDEEETAFMAMYRWIAGV

SEQ ID NO: 1036 - protein, 237 aa, Zea mays
MDHQMFDDPFGSSGISSLEADIFSAAAGSQLPSPPWPDFDDDYDIPDLSALPANAATSSGGGYGSGGSGGHRKLSHNAYERDRRKQLNDLYSSLRSLLPDADHTKKLSIPTTVSRVLKYIPELQKQVDNLERRKRELTNANCKPGVLNTSEIVTTPIVSATCLNDTEIMVQVSLHSNVAATALPLSKCIKVLEDAGLHLISSSTYSTFGNKTFYSLHLQVCMHVHSMVPAVSFNFFI

SEQ ID NO: 1037 - protein, 221 aa, Pinus radiata
MVRGKTQMKRIENDTSRQVTFSKRRNGLLKKAYELSVLCDAEVGLIIFSPRGKLYEFASPSMEEILEKYKKRSKENGMAQTTKEQDTQYSKHSKQKLANMEEQIRILESTQRKMLGEGLESCSMAELNKLESQAERGLSHIRARKTEILVDQIECLKRKERLLSEENALLSRKWVDRQSVDGSGSTSSSIGLGSIEQIEVETQLVIRPPNAQDHCSVNSGH

SEQ ID NO: 1038 - protein, 300 aa, Arabidopsis thaliana
MGAPKQKWTQEEESALKSGVIKHGPGKWRTILKDPEFSGVLYLRSNVDLKDKWRNMSVMANGWGSREKSRLAVKRTFSLPKQEENSLALTNSLQSDEENVDATSGLQVSSNPPPRRPNVRLDSLIMEAIATLKEPGGCNKTTIGAYIEDQYHAPPDFKRLLSTKLKYLTSCGKLVKVKRKYRIPNSTPLSSHRRKGLGVFGGKQRTSSLPSPKTDIDEVNFQTRSQIDTEIARMKSMNVHEAAAVAAQAVAEAEAAMAEAEEAAKEAEAAEAEAEVAQAFAEEASKTLKGRNICKMMIRA

SEQ ID NO: 1039 - protein, 214 aa, Pinus radiata
MGRGRIRLRKIESATSRQVTFSKRKNGLLKKAYELSVLCDVELGLIVLSPRGKVHEFSSTCMQKMLERYEKCSEGSKTTSIAKEEDPKALKREIANMEERIEILERTQRKMLGEELASCALKDLNQLESQVERGLRNIRARKSEILVTQIEQLQRKERMFSEENNFLRKRIVDPHSVLTTPASGSGSLQRSEVETQLVMRPPSSNADFLFNSSH

SEQ ID NO: 1040 - protein, 223 aa, Pinus radiata
MVRGKTQMKRIENATSRQVTLSKRRNGLLKKAYELSVLCDAEVGLIVFSPSGKLYEFASTSMQKLLEKYEICSQECGTSESNKKQDPQCLKQEIENMEKRVRILQSTQRKMLGEGLALCSIKELNQLEGQVERGLNHVRATKTKVLLDEIEKLKQKEHVFREEKALLHKKSVNLRGANGCTIPSIGLTSIERVEVQTQLVMRPPHATEMDDNFMDVDNVPLSG

SEQ ID NO: 1041 - protein, 214 aa, Pinus radiata
MARGKTQMRKIESATSRQVTFSKRRNGLLKKAYEMSVLCDAQLGLIVFSPRGKVYEFSSTCMQKMLARYENFSEGSKATSTAKEQDVQGLKRQIANMEERIEILESMHRKMLGDELASCALKDLNELESQVERGLRNVRARKTEILVTEIEQLQRKEWILSEENAFLGKKFVHPHSVSKTPGSESGSIQNSEVETQLVMRPPCTNAHFLINSSH

SEQ ID NO: 1042 - protein, 373 aa, Populus tremula x Populus alba
MNSTSTQFVTSGRTGIYDPMHQIGMWGENFKSNRNTSTSTMFIADNPNPSASIIIAPDSKLDDQSEGTSHGTLGASNKYDQEASKPSDKVQRRLAQNREAARKSRLRKKAYVQQLESSRTKLVQLEQELDRARQQGLYIGGGVDTSQLGFGGATNSGIPPFEMEYGHWLEEQNRHICDMKIALDAHISDAELHRLVESDMSHYSELFRIKATAAEADVFYVMSGLWKSSAERFLLWIGGFRPSELLKILLPHIEPLSEQQVMNALNLRQSCQQAEDALSQGMEKLQQTLAETVAAGQLGEASYSHHKETAMAKLKDLVRFVLQADHLRQETLQQMSRILTTRQAARGLLALGEYFQRLRYLSSLWATRPCEPA

SEQ ID NO: 1043 - protein, 342 aa, Brassica nigra
  misc_feature (177)..(177): Xaa can be any naturally occurring amino acid
MLKQESNWAQACDTCRSAACTVYCRADSAYLCTSCDAQIHAANRLASRHERVRVCESCERAPAAFFCKADAASLCTACDSQIHSANPLARRHQRVPILPISGCVATNHHSSETTEPENIVVVGQEEEDEAEAASWLLPSSVKNCGDNNNNTENNRFSVGEEYLDLVDYSSSIDKRFXGQTNQYQQDYNVPQRSYVADGVVPLQVGVANGHMHHEKHNFQFGFTNVSSEASPIHMVSLVPESVTSDATVSHPRSPKAGTEELPEAPVQMLSPMERKARVLRYREKKKTRKFEKRIRYASRKEYAEKRPRIKGRFAKRNEVDADHALSTMVMFDTGYGIVPSFS

SEQ ID NO: 1044 - protein, 344 aa, Brassica nigra
MLKQESNWAQACDTCRSAACTVYCRADSAYLCTSCDAQIHAANRLASRHERVRVCESCERAPAAFFCKADAASLCTACDSQIHSANPLARRHQRVPILPISGCVATNHHSSETTEPENIVVVGQEEEDEAEAASWLLPSSVKNCGDHNNNNNSENNRFSVGEEYLDLVDYSSSMDKRFTGQSIQYQQDYNVPQRSYVADGVVPLQVGVANGHMHHKKHNFQFGFTNVSSEASPIHMVSLVPESVTSDATVSHPRSPKAGTEELPEAPVQMLSPMERKARVLRYREKKKTRKFEKRIRYASRKEYAEKRPRIKGRFAKRNEVDADHALSTMVVFDTGYGIVPSFS

SEQ ID NO: 1045 - protein, 304 aa, Oryza sativa (japonica cultivar-group)
MSGMNSLSMVEARLPPGFRFHPRDDELVLDYLERKLLDGGVGGAAAAAAAVTIYGCPVMVDVDLNKCEPWDLPEIACVGGKEWYFYSLRDRKYATGQRTNRATESGYWKATGKDRPISRKGLLVGMRKTLVFYKGRAPKGKKTEWVMHEFRKEGQGDPMKLPLKEDWVLCRVFYKSRTTIAKLPTEGSYNNIDSVATTSLPPLTDNYIAFDQPGSMQNLEGYEQVPCFSNNPSQQPSSSMNVPLTSAMVDQEQNNMGRAIKDVLSQFTKFEGNVKREALQSNFSQDGFDYLAESGFTQMWNSLS

SEQ ID NO: 1046 - protein, 124 aa, Gossypium herbaceum
IEKVVSSIKAMKPKIVTVVEQEANHNGPVFLDRFTEALHYYSTLFDSLEGSGVAPPSQDLAMSELYLGRQICNVVACEGMDRVERHEPLTQWRTRMETAGFSPVHLGSNAYKQASMLLALFASG

SEQ ID NO: 1047 - protein, 85 aa, Brassica napus
MMMGKDDLGLSLSLGFAQNQHPLHLNLKPTSSPMSNHQMFPWNQTFVSSSNHQNHQSLRKIDVNSFPSTVELEEETGVSSPNSTI

SEQ ID NO: 1048 - protein, 197 aa, Illicium henryi
GGILKKARELTVLCDAQVSLIMFSSTGKFSEYCSPSATTKKIFDRYQHVSGINLWNSHYQKMQVELNKLKEENNKLRRKIRQRVGGDLDGLNEKELRGLEQNLVDCAKIVRDRKYHVINNESETFRKKIRNLEERHKELLSAMEGNPPSYLFEDNGTELAGDFGSRNSSSLMFAFRVQPSQPNLHDVVYSTHELRLG

SEQ ID NO: 1049 - protein, 138 aa, Brassica napus
MASSSARGELEKMGIDQLKALKEQADLEVNLLQDSLNNIRTANARLESAAGALNDLSLRPQGKKMLVPLTASLYVPGTLDEADKVLVDIGTGYFIEKTMEDGKDYCQRKINLLKSNYEQLFEVLAKKKSVADVLLGRS

SEQ ID NO: 1050 - protein, 297 aa, Solanum tuberosum
MSSVYSDKSSSTPAVTGGGFGGEIMLFGVRVKVDPMRKSVSLNDLSQYEHPNANNNNNGGDNNESSKVAQDEGYASADDAVQHQSNSGRERKRGVPWTEEEHKLFLLGLQKVGKGDWRGISRNFVKTRTPTQVASHAQKYFLRRSNLNRRRRRSSLFDITTDSVSVMPIEEVENKQEIPVVAPATLPTTKTNAFPVAPTVGPIIFPVQIDKSREYPTLLRHDHGNSSMLVGPVPMFSMPNPSTAIDLNANHNSTIEPSSLSLRLSLSLDQGQASSTRHSAYNVMSSFSNGESIIRVA

SEQ ID NO: 1051 - protein, 201 aa, Illicium henryi
SKRRVGILKKAWELSVLCDAHVSLIMISNSGKLSEYCTPTTTTKSMLDRYQEVSGINLWSSNYEKLQTQLNKLKEENESLRKDISHKKGEDLIDLSFEELRGLEHSIEQHLKLVQEKKLRKIATQIETYKKKVRSALEQHKILLGEIEAIDPQYNLCDGETDYEPALGSGNGSSQLVEFHMQDTNQIYDDTGFDFHDLRLV

SEQ ID NO: 1052 - protein, 514 aa, Petroselinum crispum
MSSSLGDLLAQPNNDDFGSNWGFENQKTKSFANQSLPFSPPPVSPSSYFSFLDSPIQNNNYTIVSSSGNGTMNAQSFKEENQNFSDFSFPAQTRPASSTSSSLIPANTNLVEDSLKRKQGGWNFEEPAKKNDFLMDNASVTSDIATLQRISPEMTMNQANMQSNAALQSNLNNYAQSSQSSQTNRDQSKLDDGYNWRKYGQKQVKGSENPRSYYKCTYLNCPTKKKVETTFDGHITEIVYKGNHNHPKPQSTKRSSSQSYQNSIGTMPESSLLENGRSEPVTTPENSSLSFGEDDLFEQGSMNKPGDDDGNEPDSKRWKGEYESNEPMSSLGSRTVREPRIVVQTTSDIDILDDGYRWRKYGQKVVKGNPNPRSYYKCTQVGCPVRKHVERASHDLRAVITTYEGKHNHDVPAPRGSGSYPAVNRPSDNTTSAPTAIRPTTNYLNPLQNPRAQPANGQAPFTLEMLQRPRSYEFSGFTNTSNTYAINQNQQASGQFSTAKDEPDVDSFFDSFLA

SEQ ID NO: 1053 - protein, 554 aa, Ostreococcus tauri
MTVEALGDDAYYASWFDDSDDAENDDDYVTNADDADDADDGFPDLGLREGLPSETCSASRNSVYVVYEPGDDIKGRRELINRACGVLGTSERDSEALLHFHAWNLEDAVTSWFENERKAREACGLSDPDAQTSEGGMATTTCNICFDDFEPSELVTAGCSHAFCTGCWAGYIASKIGEGLSVVDTRCPMTKCPIKVGEAMMRRFLNEDDAKKFDVYLGRSFVESNVKIQPCTGIDCERSIVFENLPTNPVAVNCTCGKVFCFSCGGDTHHPIPCKVASEWTKKITLDGANSEWMLVNTKPCPKCQRPILKNGGCMHMQCSQCHTSFCWLCSSPWDAGPYACSKRCNQYKRTESNSNENRKKRARESLERYVFYYERYRAHENSGKKALEDVDKFKSSALGFLIELQRTSETQVGFVMKALKQVSSSRQILKWTYAYAYFELADDVRKKNFFEHVQGEMERALELISRMIELDIKAFLPPDPDTEDDEKVALEKAMAYRYPPEEQDKLEKAFEQYKTLLIDRTAVLRKSCDTLCIELENGLLGMSTPIKGSQQDA

SEQ ID NO: 1054 - protein, 197 aa, Illicium henryi
VGILKKAWELSVLCDAHVSLIMISNSGKLSEYCTPTTTTKSMLDRYQEVSGINLWSSNYEKLQTQLNKLKEENESLRKDISHKKGEDLIDLSFEELRGLEHSIEQHLKLVQEKKLRKIATQIETYKKKVRSALEQHKILLGEFEAIDPQYNLCDGETDYEPALGLGNGSSQLVEFHMQDTNQIYDDTGFDFHDLRLV

SEQ ID NO: 1055 - protein, 197 aa, Oryza sativa (indica cultivar-group)
MDPTKSSTPPPVMGAPVGFPPGAYPPPPPAGAAAAAYAQQLYAPPAAAAAQQAAAAQQQLQMFWAEQYREIEATTDFKNQKLPLARIKKIMKADEDVRMIAAEAPVVFARACEMFILELTHRGWAHAEENKRRTLQKSDIAAAIARTEVFDFLVDIVPRDDAKDADAAAAAAAAGIPRPAAGVPATDPLAYYYVPQQ

SEQ ID NO: 1056 - protein, 202 aa, Illicium henryi
VGILKKARELSVLCDAEVSLIMFSNSGKLSEYCTPSTSIKSILDRYQHISGINLWSSHYQKMKSHLNKLQEENERLRKEISHTKGEDLVGLSFNELRGLEHSIDEYLKVVSEKKIRKIVTQIDTCKKKVRSALEQHKLLLRETETIDQDPQYSLYDSETDFEPALGLGNGHQQLEYYHLQPNNHQAEVGDDIGYNFHDLRLG

SEQ ID NO: 1057 - protein, 321 aa, Zea mays
MDPRFTLPAAIGGGAGRVHHRRAHSESFLCFSDADLLLDPDGDLSFSDLDFPSLSDDSPAASDPTPPPPLPQPAPAPRPAGGAHTRSLSLDAAFFEGLAFQGPSGSAGGGPGHKRSGSMDGATSPFEGESALSSGLPDYAKKAMPAERIAELALIDPKRAKRILANRQSAARSKERKVKYTSELEKKVQTLQTEATTLSAQLTLLQRDTTGLTAENRELKLRLQSMEEQAKLRDALNETLREEVQRLKIAAGQVGNMNGNPFNGGLQQQIPSYFVQQQQMSYFGGHQAQAQHHSQNHHHRSPSNGRQSPSDQSLNDSMDFV

SEQ ID NO: 1058 - protein, 141 aa, Canavalia gladiata
MPKVKADAKAADNRLKRKGAGAGRKQSKKAAKDPNKPKRPPSAFFVFMSEFREQYKKEHPTNKSVAVVGKAGGDKWKSLSDAEKAPFVARAEKKKEEYDKSILAYNRKLEGKNPSEEEKSDKSKSEVNDEDEDEEEDQDDE

SEQ ID NO: 1059 - protein, 202 aa, Illicium henryi
VGILKKARELSVLCDAEVSLIMFSNSGKLSEYCTPSTSIKSILDRYQHISGINLWSSHYQKMKSHLNKLQEENERLRKEIRHTKGEDLVGLSFNELRGLEHSIDEYLKVVSEKKIRKIVTQIDTSKKKVRSALEQHKLLLRETETIDQDPQYSLYDSETDFEPALGLGNGHQQLEYYHLQPNNHQAEVGDDIGYNFHDLRLG

SEQ ID NO: 1060 - protein, 357 aa, Zea mays
SSRANEGVRAEAIIHGRQPQEGGRGRRQRGFHRREAIASTYGCPFGEGCHFVHYFPGDYRAVSEMTNLGGATIAPPGGMMMDGPPTPIVKTRLCNKYNTAEGCKWGDRCHFAHGESELGKSMMDNYMPPPIGPPPTGYFAPPPMAPPPMAPPPMAPPPMAPLPMAPPPMAPPPMAPPPMAPPPMAPLPMAPPPMAPPPMAPPPMAPPPMAPLPMAPPPMAPPPMAPPPMANPGLATPASFGAYATAKISVDASLAGGIIGKGGANIKQISSVTGAKVVIQEDRHESDTSLKNIEFEGTFDQIRNASAMVIELIVSISGIGSNFKTKMCENFAKGSCSYGGKCHFAHGESELRKPAAA

SEQ ID NO: 1061 - protein, 754 aa, Oryza sativa (japonica cultivar-group)
MEVMYGETGTAAVSVPLVLESREEGSLQESMQRPSSPTMNIEQESMQRPFSPTIGTETSSPEMAPAGSENCKVSWLPLPPPTPLGESMPSLPVAAAPKVLLVMPEEAVESVPSSEALDVEKPASITQAEPSSPNTPPPGFENFKSSWLPLPTTPPPVETTDVLPDVVVTKAVEAPIEEVSRPLPALEVTNMESDTVLSILPTTVLPTEGTEGLLQQPLLRPPSPVVQSEPCLQNEMAPPGFENFKSSSEPCSAEEIAPPGSDNFKSSSEPCLPEEMAPPGFENFKSSSEPCSQEEMAPPGFENFKSSWPPLPTLPQTVPDAAAADALAATVEEAAGPPPALELEAMDVDMDAIHPPPLPFDSGVESLQKPLPRAPSPIMQEAPCSPDRAPPGFETYKSSQLLLPSPSLAQTTNVRQDQSVTEPVSVIEEAPQLLHSVEVMGVHMDAVPPLLPSSESGADGLSPQQFAQPPPAEKDTTTCLPDMVHSGCDNSEPSQLLSLPAVISPVQTPDGLADVPAIDRVAVALEESPQRPLVSGEMEAGTVPIRSSPLKNISEGSLPQLESESHSPTSQAADSLLDASDSKSVAVASEEMSQLPLASQATTTDLVSTTAMQPQSEGIVDESLQPQHPPSSTAHDSPCLQDSVPLVPPPPSPYLNKEVGQMVCGSCRILLAYFRGAGYVHCTCCQTMNYVLEAHEVGKVHCGHCATLLMYPFGAPAVKCSLCLFVTEIGERNVRRRLSIEQPTRTNSSGLAEA

SEQ ID NO: 1062 - protein, 259 aa, Zea mays
MLNMMTDLSCGPSSKVKEQVAAAPTGSGDRQGQGRGKIEIKRIENTTNRQVTFCKRRNGLLKKAYELSVLCDAEVALVVFSSRGRLYEYANNSVKSTIERYKKANSDSSNSGTVAEVNAQYYQQESSKLRQMIHSLQNANTRNIVGDSIHTMGLRDLKQMEGKLEKAISKIRARKNELLYAEVDYMQKREMDLQTDNMYLTSKIAESNETGQPAMHMMGVPPPTSEYDHMAPFDSRNFLQVSMPQHYSHQLQPTTLQLG

SEQ ID NO: 1063 - protein, 342 aa, Zea mays
MEAAGWLQSPATPPIYNTTTSLAPSAVAATATTTTVAEPSPHPHSRLRMMPQASASLDLGLSLGLTLTSQGSLSSSTTTAGSSSPWAAALSSVVADVARARGDAYAQHHAGAAMTMRASTSPDSGDTTTAKREREGELERTGSGGVRSDEEDGADGGAGGRKKLRLSKDQAAVLEECFKTHSTLNPKQKVQLANRLGLRPRQVEVWFQNRRARTKLKQTEVDCEYLKRWCDRLADENKRLEKELADLRALKAAPPSSAAAQPASAAATLTMCPSCRRVAAAASHHHQPPPPQCHPKPTVAAGGGSVVPRPSHCQFFPAAAVDRTSQGTWNTAAPPLVTRELF

SEQ ID NO: 1064 - protein, 274 aa, Glycine max
MGIQTVGSLGNGQQSHLQPSSLSRQGSWYSLTLDEVNCQLGDMGKPLGSMNLDELLQNVWTAEASKSSVVVGVESENMSSSSSSLQRQASLTLARALSGKTVDDVWREIQQGQKKKYGEDVRSQEGEMTLGETTLEDFLVQAGLFAEASISPAVGLDAMDSLATQGFQQKTGLLSSSPSIGSLSDTRLGRKRDASDAYEKTLERRLRRKIKNRESAARSRARKQAYHNELVGKVSRLEEENVKLKKEKEFEERLLPDPLPERKYQLRRHNSAFF

SEQ ID NO: 1065 - protein, 267 aa, Triticum aestivum
  misc_feature (100)..(100): Xaa can be any naturally occurring amino acid
MTFSVSPATGASQEYMIRFDGHFEDPSSAAASAEPPLPFAGRAFSPQQEQSAMVAALLHVVSGYTTPAPDLFFPARKEACTACGMDGCLGCEFFGAEARXAVAASDAPRAPAAGGPQRRRRNKKNQYRGVRQRPWGKWAAEIRDPRRAVRVWLGTFDTAEDAARAYDRAAVEFRGPRAKLNFSFPEQQQQQLGGSGNAAAKSDACSPSPSPRSADEDETGDLLWDGLVDLMKLDESDLCLLLPVDNTLDKFHIEGKRRSGSGVPLCY

SEQ ID NO: 1066 - protein, 400 aa, Arabidopsis thaliana
MSKSRDTVRHKLFGRTITSLLDVNCYDPSSLSPVHDVSSDPSKEDSSSSSSSCSPTIGPIRVPVKKSEQESNKFKDPYILSDLNEPPKAVSEISSPRSSKNNCDQQSEITTTTTTSTTSGEKSTALKKPDKLIPCPRCESANTKFCYYNNYNVNQPRYFCRNCQRYWTAGGSMRNVPVGSGRRKNKGWPSSNHYLQVTSEDCDNNNSGTILSFGSSESSVTETGKHQSGDTAKISADSVSQENKSYQGFLPPQVMLPNNSSPWPYQWSPTGPNASFYPVPFYWGCTVPIYPTSETSSCLGKRSRDQTEGRINDTNTTITTTRARLVSESLRMNIEASKSAVWSKLPTKPEKKTQGFSLFNGFDTKGNSNRSSLVSETSHSLQANPAAMSRAMNFRESMQQ

SEQ ID NO: 1067 - protein, 291 aa, Arabidopsis thaliana
  misc_feature (37)..(37): Xaa can be any naturally occurring amino acid
MMMGKEDLGLSLSLGFSQNHNPLQHWKKPSLWEKAPXNSSLSNNLQRLPWNQTFDPTSDLRKIDVNSFPSTVNCEEDTGVSSPNSTISSTISGKRSEREGISGTGVGSGDDHDEITPDRGYSRGTSDEEEDGGETSRKKLRLSKDQSAFLEETFKEHNTLNPKQKLALAKKLNLTARQVEVWFQNRRARTKLKQTEVDCEYLKRCVEKLTEENRRLQKEAMELRTLKLSPQFYGQMTPPTTLIMCPSCERVGGPSSSNHHHNHRPVSINPWVACAGQVAHGLNFEALRPRS

SEQ ID NO: 1068 - protein, 489 aa, Triticum aestivum
  misc_feature (225)..(225): Xaa can be any naturally occurring amino acid
  misc_feature (239)..(239): Xaa can be any naturally occurring amino acid
  misc_feature (250)..(250): Xaa can be any naturally occurring amino acid
  misc_feature (258)..(258): Xaa can be any naturally occurring amino acid
MALSTLLLPSSSSTAADTSDRRRGQQPQNHHSKRKKKPPALPPPLSPAPRTPGRRHLAATGTPSRKSPALAAPTAGAKARLVASKDHRQRRSGSKKATAQKPARPASSWEQLKSLLSCRSATAAARVHDPAALARGPGAGGYWGTSLCSMRDVATVDGASSAASVVVDHRDTAPLNRSSRRAHHSSSSAAGGGGHPSSLRGLSGCYECRAINVEPVSRRYPRPRXELCPCSQCGEGVHXRADSLEQHQAXRHAVSELXGPEDSGRNIVEIIFKSSWQKRDRPICHIDRILKVRNPPRTVARFEAYRDAVRARCRADVSAGGGGATRAAADGNELLRFHPAALACELGADGSTSLCASCDDGDADGKTAAAACGVCAAIRHGFAPWAGAHPLGVRTTASSGRAHDVCGAEAVGAPGWRAMLVCRVIAGQVRRRDGDEDGEEKEVEAGPFDSVAGDDAGGAYGVLEELFVANPRAILPCFVVVYRVDVDAQ

SEQ ID NO: 1069 - protein, 424 aa, Oryza sativa (japonica cultivar-group)
MAAAGNSFLNQELVKVADGVSDWHLPSSSHGGTCHTNTRGAPITVGVPDLGCPVSSIGMATSSSLMPKEGLTTASYNSVVAFPVGATMVPQQQQTQAAGSNDNPGLVKGGWTREEDEVLRQMVRHHGDRKWAEIAKSLPGRVGKQCRERWTNHLHPDIKKDIWTEEEDRMLIEAHQTYGNSWSAIAKQLPGRSENTIKNHWNATKRSLNSKRRLRKKNSEQTVPGQPSLLENYIRSCQHMLPNETVPPPPAPPAPFDISRYGNSGVIDASPTLPVVQEPGTSTPPGLVMFLDLLNQAIPHPPQPETMDLFNMTPEVSHLNTSGYCLQLDAGGNLYYGRLPVPAPVQPHGISTQELQDTPHLSLYYPLSSFAGSHTDGTVEFDHQLSNPDGGTMVRRQAQVASPLVAAPMAWMTMTSSKWRPTSL

SEQ ID NO: 1070 - protein, 370 aa, Oryza sativa
MASKAGGGGVARRGGGRMRSLGRQGSMYSLTLDEVQSQLGEPLHSMNLDELLRSVFPDGLAIADGAGAGAGATTSSQQHQPGSGLLRQGSITMPPELSKKTVDEVWKGIQAAPKRNAETGGGGGGGRRRRERQPTLGEVTLEDFLVKAGVVTQGSLKELSDVGNVDPVGRGVTATGTVDLAPGSHWIEQYKQQIASTDAHHHGQQGVQGAYFPNRLVPQPLNVGPGAILEPSYSDGQTSSGMIGGMSDSQTPGRKRGMSGDVADKLMERRQKRMIKNRESAARSRARKQAYTNELENKVSRLEEENVRLKRQKESDYLHYTRSNLVMENIEIHRSLINSNIIIWYDELYYFIGSVSSYNQEVFVMVIVCV

SEQ ID NO: 1071 - protein, 1013 aa, Oryza sativa (indica cultivar-group)
MGAPKQKWTAEEESALKAGIAKHGAGKWRTILKDPDFSNVLRYRSNVDLKDKWRNMNVTVNASGARDRVKAPVVKKPRSAPKHEGHSTSTAIAAVTSDGDDDVAEPVPLATSTSSKRSLSRLDNIIVEAVRSLNEPTGSYKTAIANYIEEQYWPPADFDHVLSSKLNDLTASGKLIKVNRKYRIAPSSSLSEGRSSKVVLLEDIKKEPTKLDREDVAVLTKSQIDAELARMRTMTAEEAAAAAARAVAEAEAIMTEAEAAVREAEAAEADAVAAQAFAEAAMATFKNRSSAKLVIALSTSVLVSNDHSSLKLPVGAGAASVSSDLVFVGGELRKKNTFLWGFGRIEMEGTAQQGFPAMFLLRLGRCLSTFTSYSRNFDESYSYSHSYWLILKRGKNAFISDFFPLYLFPLLSKSAILGRLIEENSDSDECVIKLSDIPGGAKSFELVARFCYGLKIELSSENVVYLRCAAEHLEMTEETSGDNLINQTESFFNQVVLRSWKDSLEVLRTCDGLLPHAEDLHIVKRCIESLAGKASIDPDLFGWPVSEHSTMQSPGGSVLWNGISTGAKVRNCSSDWWYDDASSLSFPTYKRLISSMESRGIKQEIIAGSLTYYAKKFLPGLNRRQSTGPMPLPAATLSDEEQRRLLEEIDRMLPLQRGLISTNVLLWLLRTAMILKVDRACISNLEKRVGMQLDEATLEDLLLPNFSYTMDTLYNVECVHRILDHFLAMDQTMGGGGASPCLDDVMASPSLAPITAVAKLIDGYLAEIAPDINLKPLKFQSLAAVLPEYARPLDDGLYRAIDVYLKSHPTLPEAEREQLCRLIDCQKLSLEACTHAAQNERLPLRVVVQVLFFEQLQLRTSVAGCLLVSDNLEASSRTLRGGGAVAASGEAGCWATAAVRENQALRVGMDSMRLRLMELERECSDMRQDIRKLGRGRRRLRGGGGIVAGGKDGGGWAARVQRMLTPRMMKLQMCSAQHDAAEQQRMNNEHKKVEKVAKNKKQLSMDDGDDEEA

SEQ ID NO: 1072 - protein, 294 aa, Zea mays
MTTLATDTAAWTREEDKAFENAVAASAAPPADGPPDDGWFTALVASVPARTAEEVRRHYEALVEDVAAIEAGRIPLPRYAGEESSAATPEGSGAAGPSTPKDGGGGSGHRREERKGGVGADAGKSCSKAEQERRKGVPWTEEEHRLFLLGLDKFGKGDWRSISRNFVISRTPTQVASHAQKYFIRLNSMNRDRRRSSIHDITSVTAGEVATAGAPITGGGPTAAGAMPMGPGGMKHHHPVPPMGMYGHAPMGHPVAGHMVAPAAVGTPVMFPPGHHSPYVLPVGYPAPPTKMHQ

SEQ ID NO: 1073 - protein, 245 aa, Eucalyptus globulus
MGRGRVQLKRIENKINRQVTFSKRRCGLLKKAHEISVLCDADVALIVFSTKGKLFEYATDCCMERILERYERYSYAESQVLTNNAETNGNWTLEHAKLKARMEILQKNQKNLMGEELDSLSLKELQNLEHQLDTALKNIRSRKIQLMCESISELQRKDKALQEQNNMLAKKVKEKEKALAQQTQWDNPQDDGLTSSSVILSQSLQPLNIGGPYHPSGIEEGAALGPPQHRNATLFPSWMLSHLQE

SEQ ID NO: 1074 - protein, 385 aa, Glycine max
MLESKDSTMKLFGKTIPAPEISAGVPALSSGDADAVGVVQNHGSSSVNGDGEEHEIEQDIMGEETTESEKEDEVTNLDTVSRPGEVSINPSTKKEDLTLKTSKKTEQEQGENSQDKTLRKPDKILPCPRCNSMDTKFCYYNNYNVNQPRHFCKNCQRYWTAGGVMRNVPVGAGRRKNKNFTSQYRQITVPEAALLSSQPDLPNGVSHPSLNCNATLLAFGSDTPLCESMTSVLNLAEKAVNNSTTNGFNGSEELEIPFAYVAGEKVNDDSNKSSDMSTKPMEGETTNRSQEQVIENCHPFPPHAPYFPGAPWPFPWNPALWNSPVPSPPAFFPQGFTMPLYPAAAYWGLTIPGAWSIPWLAQPSLPNSTVSNSGPDPIARTIAMS

SEQ ID NO: 1075 - protein, 124 aa, Gossypium barbadense
IEKVVSSIKAMKPKIVTVVEQEANHNGPVFLDRFTEALHYYSTLFDSLEGSGVAPASQDLAMSELYLGRQICNVVACEGMDRVERHEPLTQWRTRMETAGFSTVHLGSNAYKQASMLLALFASG

SEQ ID NO: 1076 - protein, 164 aa, Oryza sativa
MDPFHHLNSSFSNPYHPLLASPPHHFAPDPLPPPPPPPPPPLLPADPPSLERERLPQWSHAETAAFLAIRADLDHSFLSTKRNKALWEAASARLHALGFARTPDQCKSKWKNLVTRFKGTEGAAAVAAAGTDQMQGGQGGGAAARGSSSSFPFHDELRRIFDAR

SEQ ID NO: 1077 - protein, 342 aa, Brassica nigra
MLKQESNWAQACDTCRSAACTVYCRADSAYLCTSCDAQIHAANRLASRHERVRVCESCERAPAAFFCKADAASLCTACDSQIHSANPLARRHQRVPILPISGCVATNHHSSETTEPENIVVVGQEEEDEAEAASWLLPSSVKNCGDNNNNTENNRFSVGEEYLDLVDYSSSIDKRFTGQTNQYQQDYNVPQRSYVADGVVPLQVGVANGHMHHEKHNFQFGFTNVSSEASPIHMVSLVPESVTSDATVSHPRSPKAGTEELPEAPVQMLSPMERKARVLRYREKKKTRKFEKRIRYASRKEYAEKRPRIKGRFAKRNEVDANHALSTMVMSDTGYGIVPSFS

SEQ ID NO: 1078 - protein, 124 aa, Gossypioides kirkii
IEKVVSSIKAMKPKIVTVVEQEANHNGPVFLDRFTEALHYYSTLFDSLEGSGVAPPSQDLAMSELYLGRQICNVVACEGMDRVERHEPLTQWRTRMETAGFSPVHLGSNAYKQASMLLALFAGG

SEQ ID NO: 1079 - protein, 85 aa, Oryza sativa (indica cultivar-group)
MASMSVSSSRAPQWTARQNEQFERALAVYDRDTPERWHNIARAVAGKSADEVKLYYDLLVEDVKRIETGKVPFPAYRCPPPAIAG

SEQ ID NO: 1080 - protein, 212 aa, Glycine max
MQDPTLFQPMKPHFPEQEQLKCPRCDSTNTKFCYYNNYNLSQPRHFCKNCRRYWTKGGALRNIPVGGGSRKNTKRSSSSNNNTKHASPSPPVSSAPAPEIDPTRTDPNPVGGGGSFRSLLASSGHLGLGNLLEGLNSSGSNLKSVQMEEFGENVSSGTPVAVPGSGQNPGLEMQSNGNAESFLSLQNGDSGCCNGTNGWSNLAIFTPGSSYQ

SEQ ID NO: 1081 - protein, 440 aa, Zea mays
MLHQTTLIPPSVSAASSSPFLHAATTAPAPGGGSCTPAFLRGASAMPSYAHHRSSPLDDGRMDALKCNNSVLPEETTADAAGAFVEKDGFSVEDLLDLEEFAEPDKDVAEREDDDAPPAAAAAAERSKADSQPSSVVKYDLPPLLPPPPEMVDLPSHDVEELEWVSRIMDDSLSELQPQAQPKPAAAVVASSAARPPLAQQRRPFAHDGAYRAVAAAPPQAGPQRTPTICALSTEAMIPVKAKRSKRSRGPGWSRPGASFLPDSASSSSTTTTSSCSSSGSISPFLRLDSSPFGGGLELGEGLFSYGHLLPRPPSKKSKHGGKGSKHRPKKRGRKPKHLPPPHPSAAASASQPGPSDRRCSHCGVQKTPQWRAGPEGAKTLCNACGVRYKSGRLLPEYRPACSPTFVSSIHSNSHRKVLEMRRKKEGGMVATAAPAVASF

SEQ ID NO: 1082 - protein, 200 aa, Lindera erythrocarpa
GGILKKARELTVLCDAEVSLIMFSSTGKFSEYCSPTTTTKKVFDRYQQVSGINLWNSHYEKMQNHLNKLKDDNNNLRREIRQRMGEDLNDLDIDELRGLEQNLDNSVKIVRERKYHVINTQTDTYKKKLKSLDEHHNDLVRALEGKDDNGDCALVDNGGPDYETALGWANGGSQMFAFCIQPCQPNLQDTRYGSHNLRLA

SEQ ID NO: 1083 - protein, 168 aa, Glycine max
MLSLPPSDPFSTFSAGFTPWDHDEDSHALFSPKPVSSSSGSDDKSEPNQHVSASSTAMEERKRRRMISNRESARRSRMRKQRHLENLRNQLNKCRVENRELSNRLQFVLHHLNRLRTENEWLHSERTLLRQKVANLTQILIFQQFQTFSPAWTCTNNNTSLMTINQVN

SEQ ID NO: 1084 - protein, 444 aa, Ostreococcus tauri
MTTSDRSRSSADAENEAPEERPTPHNAHAHEDGYRWRKYGQKNIKGSRHPRSYYRCTERGCPARKKTELASDDESDEDEGDRMRVTYEGVHTHPKPSRGRGPSMLMSMEPLCIAATPERATSGTSSGTVFGRRRGREEGQTEREKRKFHEFSIKSESLETPKKRRKESPAAKTTPRSRTTPQSKTPPRQTPSRPNRSRASGSRSRQRERRESSCSAQNAGRSSSYRAKKPMKQPVNPTLMSDMMTCFNEYVTNSEQWTANGHIGGHVAPFKSSALEYEHHRRPVVPPPPQERSLSDRLFDWLPLSPLSPTWPSWPFGDADLEAKLLRSTPARENQAVEYNHDHRPPSPSAHRRRRTYGAHPRRAPSRLVPRRVSPLALRVHHLKHSTSRDAHENHALRSLLWARAEISLVRRASSLEDARDPRPYTRTRCTPPHSARHFALFSV

SEQ ID NO: 1085 - protein, 212 aa, Lindera erythrocarpa
GGILKKARELTVLCDAEVSLIMFSSTGKFSEYCSPTTTTKKVFDRYQQVSGINLWNSHYEKMQNHLNKLKNDNNNLRREIRQRMGEDLNDLDIDELRGLEQNLDNSLKIVRERKYHVISTRTETYKKKLRSLHEDHGKLVRSLERKDDNGDCALGDNGGPDYETALGWVNGGSQMFAFCIQPCHPNLQETRYGSHDLRLSGGSSTVTQLQPL

SEQ ID NO: 1086 - protein, 325 aa, Capsicum annuum
GTGTALYTAFTSSRISAAQILKAYKAFITACPFKLLSNIFANKYIRKLIAGEPKIHIIDFGILYGFQWPCLIQGLSMRPGGPPELRITGIDLPQPGFKPAERVEETGRRLEKYCKRFKVPFVFKAIAKKWESITVEELEIQRDEVLIVNSLYRLGNIPDETVVQNSPRDAVLDLIRRIRPDMFIHGVLNGTFNTPYFVTRFREALFHYSSLFDMFEASLPREDEDRKLFEEEVFARDAMNVIACEGTERVERPETYKQWQLRCVRAGFKQLPLDQEIVKTVSNKVRSEYHKDFSVHEDGRWMLQGWKGRVFYALSCWKPTRLSAN

SEQ ID NO: 1087 - protein, 314 aa, Zea mays
  misc_feature (207)..(207): Xaa can be any naturally occurring amino acid
  misc_feature (269)..(270): Xaa can be any naturally occurring amino acid
PRGRPGPSSPLASPSLSFLDILSLSSLSTILRRAEAARDTIGKLLQQEIKLSPTQDQKKLCMEQEEVGLALGLSLGSGHHHQELKPQHPSHPCAALLEPSLSLGSPATKDDGPTAPVRRFAAVKRELQTMEGNDDEATGRVLVYSVASSAVVTADDDEGCNSSRKKLRLSKEQSALLEDHFKEHSTLNPKQKAALARQLNLSPRQVXEVWFQNRRARTKLKQTEVDCEILKRCCETLTEENRRLHRELQQLRAFFMPTAAAAALSIWSXXQRLVATGASAAAGATAGAENKPKAGGPGGRAPHVFSPFTNSAAC

SEQ ID NO: 1088 - protein, 210 aa, Oryza sativa
ACRSAKTLWEAVSARLRERGYRRTAEQCKCKWKNLVNRYKGKETSDPENGRQCPFFDELHAVFTERARTMQQQLLESESGPSVKKKLKRPSGDLSSEDSDDEEDGGGDSGDEKPIRSRKRKTADKRQQSQRMAEKSRTSISSIHELLQDFLVQQQRMDIQWHEMMERRSQERIVFEQEWRQSMQKLEQERLMLEHTWMERGRSNIRMPRS

SEQ ID NO: 1089 - protein, 414 aa, Arabidopsis thaliana
MGRHSCCYKQKLRKGLWSPEEDEKLLTHITNHGHGCWSSVPKLAGLQRCGKSCRLRWINYLRPDLKRGAFSPEEENLIVELHAVLGNRWSQIASRLPGRTDNEIKNLWNSSIKKKLKQRGIDPNTHKPISEVESFSDKDKPTTSNNKRSGNDHKSPSSSSATNQDFFLERPSDLSDYFGFQKLNFNSNLGLSVTTDSSLCSMIPPQFSPGNMVGSVLQTPVCVKPSISLPPDNNSSSPISGGDHVKLAAPNWEFQTNNNNTSNFFDNGGFSWSIPNSSTSSSQVKPNHNFEEIKWSEYLNTPFFIGSTVQSQTSQPIYIKSETDYLANVSNMTDPWSQNENLGTTETSDVFSKDLQRMAVSFDFMYSILDDSSERSVFAINLLKNNDERNKSVSVCFRERIVIHSHILHHFSDL

SEQ ID NO: 1090 - protein, 285 aa, Zea mays
MAASPSPSGSGGGKAGVDRIKGPWSPEEDEALQRLVRRHGARNWSLISRSVPGRSGKSCRLRWCNQLSPRVEHRPFTPDEDDAILRAHARFGNKWATIARLLSGRTDNAIKNHWNSTLKRERERKREYYADARPGPGDQRSLKRTSSDGPPGSPSGSDLSGSSHQSLPTVMPSAASTAVTSQQQLQHVYYRPVPRAGGVVLLPVAPPSPQAPPATSLSLSLSLPGLDQQPEPSPPPPPTPQAQPSSAFSAEFLLMMQEMIRIEVRNYMSGSGFDAHAVMGMAEID

SEQ ID NO: 1091 - protein, 766 aa, Ostreococcus tauri
MLREEGRLPTSTSSETRASRRATRASFGTERAGDVKSVLIVDDVALVRRIHAGHVGKLGYRTIDARDGAEALRLYGENHAGLQGILLDVMMPGMDGFQTAGGIRELEQKQALRRMPIIAVTSLTEKEMQWDDKLASFDGHVDKPTSMSTLASIFKSMSMTPDLRISENEATGAAHASLLDPHGVKRTRGANMPSSSESDADGNLDGSNEGSSEQNGRKGSNSDRDAEGQRSSGGSGNEEGQNAYVSPRSERRVRSPGPDNRSRRPANATMAGSGKNTSGGNASDEGSGDASRQGSADEDGEMKSTMDTKAETAPESNAKVKDLATGKVPSADNGDAEIKTATKTTRASAGKAVENEESPNAKAMEENTPIPCARCGSDRTRFCYYNNGLPTQPRYYCRSCQRYWTDGGILRNLPEGSGKRKDRAPLINTNLPQTSVPLAPETAPQKPTVPVTTMVSGEANANAPTEMQRAVLMLMTQVAGFDVNHAAKHAGVVASRAGEQVAQAVLQNLGHTSEAIDMAISMAKITGWRIGLSVSAVATASVSQGLNPAEISNLISTQLPFLADTLVREISEQAKTMKLMRKSPSGGSDSGGSGGTGEENGGKSATSAKSASTTATATAMGTLPSTQEALMQRWMSDLRNFGFGASQGTGMPPANETEIPVARKPFESNVQATANLRTIEKSSSSAFEVPKSASTGAFTVPMPVPRTANAPAPMNFPMNPTAWLAKMNRQASLRSQQNNSGTPPTQQHFVKTEVPRVDDKTRPERK

SEQ ID NO: 1092 - protein, 286 aa, Zea mays
MGAPKQRWTSEEEAALRAGVARHGVGNWRMILNDPELSSTLRYRSNVDLKDKWRNMNVIVTSSSTRDRGRTSTRRTRAAPKNNDQLLAMSTITSEVDDEIVDVKPIVSMSVEGWNTSNSKKSHSRLDNIIMEAIKNLNEPTGSHRTTIANYIEEQYWPPSDFDHLLSAKLKYLATSGKLLKVNRKYRIAPSLLEDVQREPLKLGSDASRTLTRSQVDAELVRMATMTVEAAAAAAAHAVAEAEAIMAEAEAAAREAEAAEAEARAAQAFAEAAVLTLKNRNAAKLV

SEQ ID NO: 1093 - protein, 387 aa, Zea mays
MAKVQGESKKGTSLLPGELTPKAESPFSPSRVKVEDALGEGLAGRSPSHIAVGANKKASNVGHIKDGSNVSKVEDGHVDRSVGVKKPRYSADEGPSLTELSGYNAKRHEFDPEYDNDAEQALAEMEFKETDSETDRELKLRVLRIYLSRLDERKRRKEFILERNLLFPNPLEKDLTNEDREVYHRYKVFMRFLSKEEHEALVRSVIEERKIRRRIQELQECRSAGCRTLAEAKIHIEQKRKKEYELNAQKAKESNHLIANTKLVQKMNRPMKIESDGNLDPKKGGVALDSPKTTGLTSVKQWDDWDIVGLPGAKLLSASEKLLCCQNRLLPSHYLRMQEVLMQEIFKGSVLKKEDAHVLFKVDPTKVDSVYDMVTKKLGNHVELPTV

SEQ ID NO: 1094 - protein, 269 aa, Triticum aestivum
MQILNEQLAAPSTGLMVKESASPGSGSGSPGGAAEKMGRGRIEIKRIENTTNRQVTFCKRRNGLLKKAYELSVLCDAEVALIVFSGRGRLYEYSNNSVKATIERYKKATSDTSSAGTVAEINAQHYQQESAKLKQQITTLQNSNRTLIGDTMATMSHRDLKQLEGRLDKGLGKIRARKNELLCAEIEYMQRREMELQNNNFFLREKVAETERGQQQTLNMMGAASTSNEYEQNMIHCDPRTFLQFNFMQQQPQYYSQQEDRKSLNSVGR

SEQ ID NO: 1095 - protein, 345 aa, Brassica nigra
  misc_feature (344)..(344): Xaa can be any naturally occurring amino acid
MLKQESNWAQACDTCRSAACTVYCRADSAYLCTSCDAQIHAANRLASRHERVRVCESCERAPAAFFCKADAASLCTACDSQIHSANPLARRHQRVPILPISGCVATNHSSKTTEPENIVVVGQEEEDEAEAASWLLPSSVKNCGDNNNNNNNNSENNRFSVGEEYLDLVDYSSSIDKRFTGQSNQYQQDYNVPQRSYVADGVVPLQVGVANGHMHHEQHNFQFGFTNVSSEASPIHMVSLVPESVTSDATVSHPRSPKAGTEELPEAPVQMLSPMERKARVLRYREKKKTRKFEKRIRYASRKEYAEKRPRIKGRFAKRNEVDADHALSTMVVFDTGYGIVPSXS

SEQ ID NO: 1096 - protein, 208 aa, Medicago truncatula
MGRRKIEIEIVKDPNTRQVTFSKRRTGLFKKANELSILCGVEIAIVVFSPGNRPYSFGHPGINVVAAKYLQQEPELSDSLGNPSSDAPDIEKLNLKLVEASSDAPGIEKLNLELTEVLTQIQEGEKQNETHDEILKQDNVMKLSELKELRDSYKELHDLVKLRLSDIEISVCMMLLAQDPVIISACLSETLFGMSHTVKTKQERKQYQ

SEQ ID NO: 1097 - protein, 226 aa, Gossypium raimondii
MRKPCCDKQGTNKGAWSKQEDQKLIDYIRIHGEGCWRSLPKAAGLHRCGKSCRLRWINYLRPDIKRGNFAQDEEDLIIKLHALLGNRWSLIAGRLPGRTDNEVKNYWNSHIKRKLMKMGIDPNNHKLNQYPHHVGPLNPTTTNSMDVACKLRVFSTENDDGVSDAASYLEDETPPTGISNLDLDLTIAFPSSPIKNIIEESQKKTASIVTNNKEEQYTVPTLLLFR

SEQ ID NO: 1098 - protein, 209 aa, Gossypium herbaceum
KQEDQKLIDYIRIHGEGCWRSLPKAAGLHRCGKSCRLRWINYLRPDIKRGNFAQDEEDLIIKLHALLGNRWSLIAGRLPGRTDNEVKNYWNSHIKRKLMKMGIDPNNHKLNQYPHHVGPLNPTTTNSMDVARKLRVCSTDNDDGVSDAASYLEDATPPTGISNLDLDLTIAFPSSPIKNIIEESQQKIASIVTNDEEEEYTVPTLLLFR

SEQ ID NO: 1099 - protein, 241 aa, Ostreococcus tauri
MTGEEGIREVQQTVDMSTLDFGYGDAGFMYSSLGLLGTDSVSWSFEEDKFFETNLAQYDGWPITGDDYWGQLQQQMPQKAVQELKDRYAKLKEDIREIESGFVSLPEYYDEGVDSEDYVTAEVSFAPMKTVKAQPAAPAVQAPAPAAPPAKKSKNVPKTGDQERRKGVPWTEEEHRLFLLGLNKFGKGDWRSISRNFVVTRTPTQVASHAQKYFIRLNSMSKKDNKRRSSIHDITSATGRD

SEQ ID NO: 1100 - protein, 931 aa, Zea mays
MEAEAAAAVVASSASASASAGRSRPSSSAAQVTSNSAVRAGEENAASLYVLSVIDSLKKRITADRLTYIKNRIGENKTNISSYTQRTYNLSKNRQISTSKGTDSASNLLTKRQDDALCTLHSLDIIPVDKDGGTFQDESPFSSSNVMFGGNLGPKNAIIRPIKLPEVPKLPPYTTWIFLDRNQRMTEDQSVLGRRRIYYDTSCGEALICSDSEDEAIEDEEEKKEFKHSEDHIIRMTVQECGMSDAVLQTLARHMERAADDIKARYEILHGEKTKDSCKKGTEHNVKVEDLYCDKDLDAALDSFDNLFCRRCLVFDCKLHGCSQDLVFPTEKQPAWSGVDDSVPCGIHCHKLASEPDAAAGADHMLFDVEEPTHSSDNVMNQPGSNRKKNGSSGRKTKSQQSESSSTARVISESSDSEVHPISNKSPQHSPSPSKVKIGPKGGIRKITNRRIAERILMSVKKGQREMASSDSNFVSGYLLARDMKLRSDTRNGNKELIVSSQQSSPSTRSSKKKSTPQIGNSSAFAEAHNDSTEEANNRHSATDGYDSSRKEEFVNENLCKQEVYLRSWKAIEQGLLVKGLEIFGRNSCLIARNLLGGMKTCKDVFQYMNYIENNSASGALSGVDSLVKGYIKGTELRTRSRYFRRRGKVRRLKYTWKSAGYNFKRITERKDQPCRQYNPCGCQSTCGKQCPCLSNGTCCEKYCGCPKICKNRFRGCHCAKSQCRSRQCPCFAADRECDPDVCRNCWVGCGDGTLGVPNQRGDNYECRNMKLLLKQQQRVLLGRSDVSGWGAFLKNSVSKHEYLGEYTGELISHKEADKRGKIYDRENSSFLFNLNNEYVLDAYRMGDKLKFANHAPDPNCYAKVIMVTGDHRVGIFAKERILAGEELFYDYRYEPDRAPAWARKPEASGAKDDGQPFNGRAKKLAQNNRG

SEQ ID NO: 1101 - protein, 218 aa, Gossypioides kirkii
QGTNKGAWSKQEDQKLIDYIRIHGEGCWRSLPKAAGLHRCGKSCRLRWINYLRPDIKRGNFAQDEEDLIIKLHALLGNRWSLIAGRLPGRTDNEVKNYWNSHIKRKLMKMGIDPNNHKLNQYPHHVVPLNPTTTNSMDVACKLRGCSTDNDDGVSDAASYLEDETPPTGISNLDLDLTIAFPSSPIKNIIKESQQKIASIVTNDEEEQYTAPTLLLFR

SEQ ID NO: 1102 - protein, 244 aa, Gnetum gnemon
  misc_feature (195)..(195): Xaa can be any naturally occurring amino acid
MVRGKTQMKRIENATSRQVTFSKRRNGLLKKAYELSILCDAEVGLIIFSPRGKLYEFANPSMQKMLDRYQKCCQESTANTSKNLVEDTQHLKREVAIMEEKIKMLEYAQKKLLGENLESLSMKELTQLENQAERGLVNIRARKTEILMDQINQLKRKSQLLGEENAVLRKKCNGPYMGGGLLSILHAGASGAGPXNNNNNNGGSGVTHHDDNNNNNRSNNVNVEDVETQLNIGPPDVHCSINQC

SEQ ID NO: 1103 - protein, 196 aa, Nymphaea sp. EMK-2003
AGIIKKAKELTVLCDAHVSLILFSSTHKLFEYCSPTTTMKKMIDRYQQVTGTNLWDSHYESMQKEFNKLKEKNERLRKSIRQRIGEDLDELNHSELCGLEQNLSEALKKIRLTLENKIKRQIDTCRKKIRLADDPRNKGFRELQEEINCSFDGSEDNYESMVVIRNSDAQPCPVRVQSSHPNLHERGYGCHDLILG

SEQ ID NO: 1104 - protein, 143 aa, Nymphaea sp. EMK-2003
AGIIKKAKELTVLCDAHVSLILFSSTHKLFEYCSPTTTMKKMIDRYQQVTGTNLWDSHYESMQKEFNKLKEKNERLRKSIRQRIGEDLDELNHSELCGLEQNLSEALKKIRLTLENKIKRQIDTCRKKVNGLSRSNVYFVGMD

SEQ ID NO: 1105 - protein, 399 aa, Oryza sativa (japonica cultivar-group)
MELGLSLGDAVTVADGGRLELVLGLGVGVGAGVRRGEEEERGRREDVVGAGRWAAMAAASPEPSVRLSLVSSLGLHWPSETGRSEAAARGFDVNRAPSVAAGAPGMEDDEEGPGAAPALSSSPNDSGGSFPLDLSGQGLRGHAEAAAQGGGGGGGGERSSSRASDDDEGASARKKLRLSKEQSAFLEESFKEHSTLNPVRMHGIFKAAPLLRICSNTRVFVSTSSFLAIDADASHRRRAEAEGGAGEAAQPPAAASGELTLFFSGADVRRTKLKQTEVDCEYLKRCCETLTEENRRLHKELAELRALKTARPFYMHLPATTLSMCPSCERVASNPATASTSAPAAATSPAAAPTAAARTAVASPEPHRPSSFAALFAAPLGFPLTAAQPRPPPPASNCL

SEQ ID NO: 1106 - protein, 143 aa, Nymphaea sp. EMK-2003
AGIIKKAKELTVLCDAHVSLILFSSTHKLFEYCSPTTTMKKMIDRYQQVTGTNLWDSHYESMQKEFNKLKEKNERLRKSIRQRIGEDLDELNHSELCGLEQNLSEALKKIRLTLENKIKRQIDTCRKKVNGLSKSNVYFVGMD

SEQ ID NO: 1107 - protein, 142 aa, Brassica rapa subsp. pekinensis
KNLGVRPGEALAVNFAFVLHHMSDESVSTENHRDRLLRMVKSLSPKVVTLVEQESNTNTAAFFPRFKETMDYYDAMFESIDVTLPRNHKQRINVEQHCLARDVVNIIACEGADRVERHELLGKWRSRFGMAGFTPYPLSPLV

SEQ ID NO: 1108 - protein, 73 aa, Arabidopsis thaliana
  misc_feature (32)..(32): Xaa can be any naturally occurring amino acid
  misc_feature (48)..(48): Xaa can be any naturally occurring amino acid
EDKGGRCANRKVKKRRLSHKRARRDKFEVKGXDWVYTELGKREREIKXVRLEEVWLEWGQFYGLHGDGYFSKV

SEQ ID NO: 1109 - protein, 108 aa, Triticum aestivum
MASLSMSSGWTPKQNKLFEQALAVHDRDTPDRWHNIARAVGGGKSADDVRCYYELLVHDIARIEAGKVPFPAYRPPCPGPGHNASYEADRYDRHRCVSYQVCMGLSWS

SEQ ID NO: 1110 - protein, 150 aa, Nymphaea sp. EMK-2003
AGIIKKAKELTVLCDAHVSLILFSSTHKLFEYCSPTTTMKKMIDRYQQVTGTNLWDSHYESMQKEFNKLKEKNERLRKSIRQRIGEDLDELNHSELCGLEQNLSEALKKIRLTLENKIKRQIDTCRKKSYKKKSIVVSMEVKIIMNPWWL

SEQ ID NO: 1111 - protein, 226 aa, Oryza sativa (japonica cultivar-group)
MGLNEKPLVPPLSPTPVDFRAHQVFPSKHHDFDTSKSRNISGSVAIGSDSEEEYLATSLLMLAHGIRDETKDIRGMGDVKGVGVDTLELVKPSQRAYECSVCGKVYWCYQALGGHMTCHRNLFAQVVAGDELSSDRTMVVKGHKCSICRLEFPSGQALGGHMRVHYVGGVEGGSVKEKNVVKTKVTGALKLVLKDFDLNVPVVATMVGDEAESSHSEAKARMMTLP

SEQ ID NO: 1112 - protein, 151 aa, Glycine max
FEEILVEEPKEGPVSPPSKIESEEGSDKDKTDDAASDEPMSKKLKRQLRNRDAAVRSRERKKLYVKNLEMKSRYLEGECRRLGHLLQCCYAENNALRLCLQLRGTYGASMTMQESAVLLLGKACDCKLYYLLLPLLFCFGHSVETTTTLLD

SEQ ID NO: 1113 - protein, 233 aa, Dianthus caryophyllus
MGRGRVELKRIENKINRQVTFAKRRNGLLKKAYELSVLCDAEVALIVFSNRGKLYEFCSTSCMNKTLERYQRCSYGSLETSQPSKETESSYQEYLKLKAKVDVLQRSHRNLLGEDLGELSTKELEQLEHQLDKSLRQIRSIKTQHMLDQLADLQKKEEMLFESNRALKTKLEESCASFRPNWDVRQPGDGFFEPLPLPCNNNLQIGYNEATQDQMNATTSAQNVHGFAQGWML

SEQ ID NO: 1114 - protein, 214 aa, Dianthus caryophyllus
MGRGKLEIRKIENKTNRQVTFSKRRNGIMKKAQELTVLCDAKVSLLMISSTHKLHHYLSPGVSLKKMYDEYQKIEGVDLWRKQWERMQEQHRKVLELNSLLRREISRRMGGDLEGLTLVELSALQQEMEEAIIQIRNKKYHTIKNQTGTTRKKIKNLEERHTDLVMELEAKFRGPQFAIGEDDPRNYEAAAAAAVYGNDVAAANLFALSRHPIT

SEQ ID NO: 1115 - protein, 231 aa, Zea mays
MGRGKVQLKRIENKINRQVTFSKRRSGLLKKAHEISVLCDAEVALIIFSTKGKLYEYSTDSCMDKILERYERYSYAEKVLISAEYETQGNWCHEYRKLKAKVETIQKCQKHLMGEDLETLNLKELQQLEQQLESSLKHIRTRKSQLMVESISALQRKLAEKQKDQRQQVQRDQTQQQTSSSSMSFMLREAAPTTNVSIFPVAAGGRVVEGAAAQPQARVGLPPWMLSHLSC

SEQ ID NO: 1116 - protein, 249 aa, Arabidopsis thaliana
MGNQKLKWTAEEEEALLAGVRKHGPGKWKNILRDPELAEQLSSRSNIDLKDKWRNLSVAPGIQGSKDKIRTPKIKAAAFHLAAAAAAAIVTPTHSGHSSPVATLPRSGSSDLSIDDSFNIVVDPKNAPRYDGMIFEALSNLTDANGSDVSAIFNFIEQQRQEVPPNFRRMLSSRLRRLAAQGKLEKQIVEASITAAYKLVEVENKLDVSKGAAEEIERLMKLAEEADEMLVIAREMHEECSQGKIMYLN

SEQ ID NO: 1117 - protein, 216 aa, Ophioglossum pedunculosum
SKRRNGLLKKAYELSVLCDAEVAVIVFSGTGKLSEFASSSMMRRILEKHRQVVEGSQSIKPTSQDVVEYWRHEATRLKHQLGVVQETQRHMLGESLETLTYRDLQKLESKLNGALNQVRGRKNQIISERLVYLQEKEDLLNAENIMMRAKLAEIMAGGVPLMSQSMQDPAARESFLNESSTQPNPPIMKNQNGEETNLQLGLELFPTTSFGDGAST

SEQ ID NO: 1118 - protein, 241 aa, Misopates orontium
MGRGRVELKRIENKINRQVTFAKRRNGLLKKAYELSVLCDAEVALIIFSNRGKLCEFCSSTSMLKTLERYQKCNYGPPETNVSTREALELSSQQEYLKLKARYEALQRSQRNLLGEDLGPLNSKELESLERQLDMSLKQIRSTRTQAMLDTLTDLQRKEHALNEANRSLKHRLMDGSQISLQWNPNAEDVGYGRQPSQPSADGFYHPLECEPTLHIGFQADPITVAGAGPSVNNYISGWLP

SEQ ID NO: 1119 - protein, 345 aa, Brassica nigra
MLKQESNWAQACDTCRSAACTVYCRADSAYLCTSCDAQIHAANRLASRHERVRVCESCERAPAAFFCKADAASLCTACDSQIHSANPLARRHQRVPILPISGCVATNHSSKTTEPENIVVVGQEEEDEAEAASWLLPSSVKNCGDNNNNNNNNSENNRFSVGEEYLDLVDYSSSIDKRFTGQSNQYQQDYNVPQRSYVADGVVPLQVGVANGHMHHEQHNFQFGFTNVSSEASPIHMVSLVPESVTSDATVSHPRSPKAGTEELPEAPVQMLSPMERKARVLRYREKKKTRKFEKRIRYASRKEYAEKRPRIKGRFAKRNEVDADHALSTMVMFDTGYGIVPSFS

SEQ ID NO: 1120 - protein, 368 aa, Triticum aestivum
QDEYKPLASKLQVDPAEQQRAMAMAVAASTMEVDQDLPGFRFHPTEEELLGFYLSRVALGKKLHFDIIGTLNIYRHDPWDLPRVAKIGEREWYFFVPRDRKAGSGGRPNRTTERGFWKATGSDRAIRSSGDPKRVFGLKKTLVFYQGRAPRGTKTDWVMNEYRLPDTGAPPPQEDTVLCKVYRKATPLKELEQRAFAMEEMKQRYGSNGGYGYGGAARACPVPAASDFYLSSSDDVQDNFLIPSTSSSSVALSGNTSSHDAPSEAKKEADVATVTLASTSSLPEAGNAPFVLQLPAANPPCGLQLPPANHGMSNMSSLQLPAASHGELQLPAATNHGVFDWLQDPFLTQLRSPWQDQHCMSPYAHLLY

SEQ ID NO: 1121 - protein, 251 aa, Boechera stricta
MGRGRVELKRIENKINRQVTFAKRRNGLLKKAYELSVLCDAEVSLIVFSNRGKLYEFCSTSNMLKTLERYQKCSYGSIEVNNKPAKELENSYREYLKLKGRYENLQRQQRNLLGEDLGPLNSKELEQLERQLDGSLKQVRCIKTQYMLDQLSDLQGKEHILLEANRALSMKLEDMTIGVRHHHIVGAWEGGDQQNVAYGHHQAQSQGLYQSLECDPTLQIGYGHPVCSEQMTVTTQVQTQPGNGYIPGWML

SEQ ID NO: 1122 - protein, 345 aa, Brassica nigra
MLKQESNWAQACDTCRSAACTVYCRADSAYLCTSCDAQIHAANRLASRHERVRVCESCERAPAAFFCKADAASLCTACDSQIHSANPLARRHQRVPILPISGCVATNHSSKTTEPENIVVVGQEEEDEAEAASWLLPSSVKNCGDNNNNNNNNSENNRFSVGEEYLDLVDYSSSIDKRFTGLSNQYQQDYNVPQRSYVADGVVPLQVGVANGHMHHEQHNFQFGFTNVSSEASPIHMVSLVPESVTSDATVSHPRSPKAGTEELPEAPVQMLSPMERKARVLRYREKKKTRKFEKRIRYASRKEYAEKRPRIKGRFAKRNEVDADHALSTMVVFDTGYGIVPSFS

SEQ ID NO: 1123 - protein, 298 aa, Zea mays
MGAEAKCDRIKGPWSPEEDEALRRLVERHGARNWTAIGRGIPGRSGKSCRLRWCNQLSPQVERRPFTAEEDAAILRAHARLGNRWAAIARLLPGRTDNAVKNHWNSSLKRKLATATGGGAAWEEASDSGDSPRPCKRASPGPESPTGSDRSELSHGSGQVFRPVPRPGGFDAISADVRPPPPRQDEDPITSLSLSLPGLEHGFHHDSARSHFQELSPSPRSPSPPPAPAPQPSSSYPFSGDLVAAMQEMIRAEVCKYMSGVGLPAGCGAGAVGEACIPQLVEGVMRAAAERVGVMTRQ

SEQ ID NO: 1124 - protein, 179 aa, Zea mays
MEGQRSQRWGYLKDKAIATSLAEEEMENSMDGEEDDTGDEDKRKRVMERARGPNTERVPLRLCLVDRCTANLTEAKQYYRRHKVCEVHAKASSATVAGVKQRFCQQCSRFHELAEFDETKRSCRRRLAGHNERRRKISGDSYGEGSGRRAVSLTQTQERNRIDMKLPMTNSPFKRPQIR

SEQ ID NO: 1125 - protein, 208 aa, Houttuynia cordata
IENDTNRQVTFSKRKNGLFKKADELTVLCDAQISIIMFSSTDKLHEYCSPSTTHKHIYDRYQKSGKEDLWRSHYEKMKNQLHMHMEENERLRKEIRQYMGEDLSGLSFNELRGLEQNMERASNIVRNKKNHVITTRAETSRKKVRALQKAHKDLAYAVGLLKAERENYGGPDCRYVVGSTNIGSHIFACPYQPNLHDASYGIPDLRFG

SEQ ID NO: 1126 - protein, 267 aa, Triticum aestivum
  misc_feature (215)..(215): Xaa can be any naturally occurring amino acid
MGAPKQKWTSEEEEALRRGVLKHGAGKWRTIQKDPEFSPVLSSRSNIDLKDKWRNLSFSASGLGSRDKQRVPRPKAPSSSPSPSPQLLLLSAPNNVAEASPPEDCEKSPQDDKTPSPKLYKFRDLEILEALGELKEPNGSEVATICNFIEIDKSYKLTDSYAKRALAPMKDPSLKKKDSAKSSKAAKGLGLFTAASPALDAAEAAAMKVADAEAXKSHLANEHMMEVERIGKMAEETESLLELASELYERCSRGEALTILQVAHREF

SEQ ID NO: 1127 - protein, 175 aa, Oryza sativa (japonica cultivar-group)
MEEDKKPRLVASSLAPVAGGGGGGSSSSAAVAAGASSSSSSSSVAAAARRGAGRAGGGAPSGGGGGPRCQVERCGVDLSEAGRYNRRHKVCQTHSKEPVVLVAGLRQRFCQQCSRFHELTEFDDAKRSCRRRLAGHNERRRKSAADTAHGENCRHADQDAGRSHQGTGNPPFQIR

SEQ ID NO: 1128 - protein, 247 aa, Momordica charantia
MGRGRVELKRIENKINRQVTFSKRRNGLLKKAYELSVLCDAEVALIIFSSRGKLYEFGSAGTTKTLERYQRCCFSPQDNHIERQTQSWFQEISKLKVKYESLCRTQRHLLGEDLGPLSVKELQNLEKQLEAALAQARQRKTQMMIDQMEALRRKERQLGDLNKELRLKLEAEGQNLKAIQSFWSSSSAAAGHGNDFPLHHSQASPIECQHEQPVLQIGYQNYFSAEGPSVRKSMTTCETNFIQGWVI

SEQ ID NO: 1129 - protein, 478 aa, Arabidopsis thaliana
CFNFFMDEEDLSSSSSHHNHHNHNNPNTYYSPFTTPTQYHPATSSTPSSTAAAAALASPYSSSGHHNDPSAFSIPQTPPSFDFSANAKWADSVLLEAARAFSDKDTARAQQILWTLNELSSPYGDTEQKLASYFLQALFNRMTGSGERCYRTMVTAAATEKTCSFESTRKTVLKFQEVSSWATFGHVAANGAILEAVDGEAKIHIVDISSTFCTQWPTLLEALATRSDDTPHLRLTTVVVANKFVNDQTASHRMMKEIGNRMEKFARLMGVPFKFNIIHHVGDLSEFDLNELDVKPDEVLAINCVGAMHGIASRGSPRDAVISSFRRLRPRIVTVVEEEADLVGEEEGGFDDEFLRGFGECLRWFRVCFESWEESFPRTSNERLMLERAAGRAIVDLVACEPSDSTERRETARKWSRRMRNSGFGAVGYSDEVADDVRALLRRYKEGVWSMVQCPDAAGIFLCWRDQPVVWASAWRPT

SEQ ID NO: 1130 - protein, 356 aa, Zea mays
MARRTSGPKKKLRRGLWSPEEDDKLVNHIAKYGHGCWSSVPKLAGLERCGKSCRLRWINYLRPDLKRGAFSQEEEDLIIHLHSMMGNKWSQIASQLPGRTDNEVKNFWNSYVKKKLRQRGIDPATHKPLPLAAEGISSRTAVFSDAELILSSPAAAAGRHMPPPPVAASAAESYVYSYSHSSGGASDGSLQSLSGYNSNSKQTAADHLGAAAAAGYLQQEQDPAAAAAAADALHCGPSGAPAVVLPSVSSSSTLNSMAGLSPAATTTDEQCTNNCSSCSFHSGLEPWLELGSTSGYYGASAAVDHYGAALDELKWSDYVFDGGYGGQPGQGIYGDSKDAVQFVDANALSSSSWCLN

SEQ ID NO: 1131 - protein, 271 aa, Oryza sativa (japonica cultivar-group)
MALGHHGAARQPPTTMAAAASSSTTSAAAAPATATTTVAFSFQHPTPTPSHHHHHHGVLGYSPLVLDHHHPTTAAASSHAPSPPTLHHHHGGGLHAAAPPPRSSPPHPWSCEEGDHRGRPQMGNKGEAAAAMGAMGINDAGNNTAAAAAAQHHLGVGAVRMKKVGGGGGGGGKARRKVREPRFCFKTMSDVDVLDDGYKWRKYGQKVVKNTQHPRSYYRCTQDNCRVKKRVERLAEDPRMVITTYEGRHVHSPSRDDDDAARASAEMTFIW

SEQ ID NO: 1132 - protein, 521 aa, Oryza sativa (japonica cultivar-group)
MLGSCAPTTAGPPPDEATTPEPFRSLQIATASAGSAKKKRRPAGTPVGRIDLLHAIVWRGNGHDPDAEVVSLSPRTLLESDRYVCEICNQGFQRDQNLQMHRRRHKVPWKLLKREAGEAARKRVFVCPEPTCLHHDPSHALGDLVGIKKHFRRKHSGHRQWACARCSKAYAVHSDYKAHLKTCGTRGHSCDCGRVFSRVESFIEHQDTCNASRGQAAAVAEGGNVSTAACGGVAVLEQEKQLDLQAPAAASLSRTASSTSPSSDVVASPVAWPGAGAPSMPSPKAAAFRGRFDMAPSPPPPSYDHYRGGAGAHNLELQLMPPFNAGGAAAAPGGMGACFYAAAHQHHPTGVSQCNDASTQLQLSIGRDEVMGAAGTSDEASAAATAKEQAREQLRQAMAEKEAAGEARAQARRQVELAEQELATARRMRHQAQVELSRAHALRDHAVRQVNATLLQITCFSCRHKFRAAAAGAPLPAAMSSDVACSYVSSVVTEGGDADDPLDVVDATRRRLQHANSMGIM

SEQ ID NO: 1133 - protein, 174 aa, Oryza sativa (japonica cultivar-group)
MAKRAGGARKKLRRGLWSPEEDEKLMNHIAKYGHGCWSSVPKLAGLERCGKSCRLRWINYLRPDLKRGAFSQEEEDLIIHLHSMLGNKWSQIAAQLPGRTDNEVKNFWNSYIKKKLRQRGIDPATHKPLAEWSDYVFDGYNHQLPPYNHGGIYGGGDSKDTAVHFDAHALGNWC

SEQ ID NO: 1134 - protein, 169 aa, Glycine max
  misc_feature (6)..(6): Xaa can be any naturally occurring amino acid
  misc_feature (13)..(13): Xaa can be any naturally occurring amino acid
  misc_feature (15)..(15): Xaa can be any naturally occurring amino acid
  misc_feature (21)..(21): Xaa can be any naturally occurring amino acid
  misc_feature (25)..(25): Xaa can be any naturally occurring amino acid
  misc_feature (29)..(30): Xaa can be any naturally occurring amino acid
  misc_feature (32)..(32): Xaa can be any naturally occurring amino acid
  misc_feature (35)..(35): Xaa can be any naturally occurring amino acid
  misc_feature (43)..(44): Xaa can be any naturally occurring amino acid
  misc_feature (49)..(50): Xaa can be any naturally occurring amino acid
  misc_feature (52)..(52): Xaa can be any naturally occurring amino acid
  misc_feature (76)..(76): Xaa can be any naturally occurring amino acid
  misc_feature (86)..(86): Xaa can be any naturally occurring amino acid
DPQKAXGNDPESXAXGEAGPXHRGXEGNXXPXGGXGEEEAGAXXPNSTXXSXRGKRSERETKGEENDTDRACFRGXSSDEEDAEAXRKKLRRAKEQATGLEESGKEHNTLNRKQKGALAKQRGLRARQGEVWAQNRRARTKLEAKEGDCELLKRRCENLTEENRRSQKE

SEQ ID NO: 1135 - protein, 235 aa, Arabidopsis thaliana
MEEGDFFNCCFSEISSGMTMNKKKMKKSNNQKRFNEEQIKSLELIFESETRLEPRKKVQVARELGLQPRQMTIWFQNKRARWKTKQLEKEYNTLRANYNNLASQFEIMKKEKQSLVSELQRLNEEMQRPKEEKHHECCGDQGLALSSSTESHNGKSEPEGRLDQGSVLCNDGDYNNNIKTEYFRVQGETDHELMNIVEKADDSCLTSSENWGGFNSDSLLDQSSSNYPNWWEFWS

SEQ ID NO: 1136 - protein, 236 aa, Gossypium hirsutum
MGRGRVELKRIENKINRQVTFAKRRNGLLKKAYELSVLCDAEVALIIFSNRGKLYEFCSSSSMIKILERYQKCNYGAPEPNVSSREAALELSSRQEYLKLKARYDALQRSQRNLLGEDLGPLSSKELESLEKQLDSSLKLIRSTRTQYMLDQLNDLQRKEHLLNEANRTLKQRLVEGYQVNSLQLNPNATEDVGYGRQQVHHQPHGDAFFHPLDCEPTLQIGYQHDPMSVVTAGPV

SEQ ID NO: 1137 - protein, 519 aa, Solanum lycopersicum
MPADPDNSSAMNDSTGSGEASVSSSGNQVVPLKESAKKKRNLPGMPDPDAEVIALSPTTLLATNRFVCEICSKGFQRDQNLQLHRRGHNLPWKLRQRSSNEVKKRVYVCPESSCVHHDPSRALGDLTGIKKHFCRKHGEKKWKCDKCSKKYAVQSDLKAHSKICGTREYKCDCGTLFSRAFCDALAQESAKTLPEKPPSTNEEPKTQAVASSSPPPSPPAPPPATESQPPPPPPAAPKSLMTPTVPPSTAVMSFASSVQNRELRENPVTNSAGAATKQVVEEAAVVASLTGNCSSSCSNGSSSSNVFGSLFASSTASGSLPSQAPVFSDIFRAMAPEHTLEMAPPSSTEPISLGLAMSHSSSIFRPAGQERRQYAPAPQPAMSATALLQKAAQMGAAATSSSFLRGIGVMSSTSSSNGHQEWSGRPSDANGASLAAGLGLGLPCDAGSGLKELMLGTPSVFGPKHPTLDLLGLGMAASVGPSPGLSALLTSMGSNLDMVTSAGSFGSADFSGKDLGRNS

SEQ ID NO: 1138 - protein, 296 aa, Zea mays
  misc_feature (60)..(60): Xaa can be any naturally occurring amino acid
MMRETYMDVLPPVDHIAARSNWFPAAARLWTAAENKQFERALAGLDLCRPDWEEVARAIXPGRTVREVVSHFKHLEVDVQQIESGQVPLPAYGGGASSFTLQWDGYGPGPGDFRHGYRFAGGCGRRHHGRTPEQERKKGVPWTEEEHRLFLLGLKKYGKGDWRNISRNFVQTRTPTQVASHAQKYFIRLNSGGKDKRRSSIHDITTVNLTDDQPPSPSQSSLITSQSNAPATAPAAGICQVPLAADAKRHGAGTLPFSSPNRTSAAPAYRMEFHDQQGLQCGPLHDQLLASQSVLF

SEQ ID NO: 1139 - protein, 223 aa, Gossypium hirsutum
MGRGKIEIKRIENTTNRQVTFCKRRNGLLKKAYELSVLCDAEVALIVFSSRGRLYEYSNNNIRSTIDRYKKACSDTSNTNTVTEINAQYYQQESAKLRQQIQMLQNSNRHLMGDSLSSLTVKELKQVENRLERGITRIRSKKHEMLLAEIEFLQKREIELENESVCLRTKIAEIERLQQANMVTGPELNAIQALASRNFFSPNVIEHPSAYSHPSDKKILHLG

SEQ ID NO: 1140 - protein, 390 aa, Oryza sativa (japonica cultivar-group)
MASNGMASSPSSFFPPNFLLHMAQQQAAPPHDPQEHHHHHHHGHHGHHHEQQQQQQHHHHLGPPPPPPPHPHNPFLPSSAQCPSLQEFRGMAPMLGKRPMSYGDGGGGGDEVNGGGEDELSDDGSQAGEKKRRLNVEQVRTLEKNFELGNKLEPERKMQLARALGLQPRQVAIWFQNRRARWKTKQLEKDYDALKRQLDAVKAENDALLNHNKKLQAEERRSMWVSVLAERLLESVPFSPPRIVALKGREAASELINLNKETEASCSNRSENSSEINLDISRTPPPDAAALDTAPTAHHHHHGGGGGGGGGGGMIPFYTSIARPASGGGVDIDQLLHSSSGGAGGPKMEHHGGGGNVQAASVDTASFGNLLCGVDEPPPFWPWPDHQHFH

SEQ ID NO: 1141 - protein, 265 aa, Zea mays
MGRGRIEIKRIENNTSRQVTFCKRRNGLLKKAYELSVLCDAEVALVVFSSRGRLYEYANNSVKATIERYKKAHAVGSSSGPPLLEHNAQQFYQQESVKLRNQIQMLQNTNRHLVGDSVGNLSLKELKQLESRLEKGISKIRARKSELLAAEINYMAKRETELQNDHMNLRTKIEEGEQQLQQVTVAQSVAAAAATDVELNPFLEMDTKCFFPGGPFATLDMKCFFPGSLQMLEAQQRQMLATELNLGYQLAPPDTDVANNNPQQF

SEQ ID NO: 1142 - protein, 294 aa, Arabidopsis thaliana
MKRLSSSDSMCGLISTSTDEQSPRGYGSNYQSMLEGYDEDATLIEEYSGNHHHMGLSEKKRRLKVDQVKALEKNFELENKLEPERKTKLAQELGLQPRQVAVWFQNRRARWKTKQLEKDYGVLKGQYDSLRHNFDSLRSDNDSLLQEISKIKAKVNGEEDNNNNKAITEGVKEEEVHKTDSIPSSPLQFLEHSSGFNYRRSFTDLRDLLPNSTVVEAGSSDSCDSSAVLNDETSSDNGRLTPPVTVTGGSFLQFVKTEQTEDHEDFLSGEEACGFFSDEQPPSLHWYSASDHWT

SEQ ID NO: 1143 - protein, 278 aa, Hordeum vulgare subsp. vulgare
METGGSKREGDCPGQERTKKVRRRTTGPDSVAETIKKWKEQNQKLQQENGSRKAPAKGSKKGCMAGKGGPENSNCAYRGVRQRTWGKWVAEIREPNRGNRLWLGSFPTAVEAARAYDDAARAMYGATARVNFPEHSPDANSGCTMAPSLLTSNGATAVSHPSDGKDESESPPSLVSNAPTAALHRSDAKDEFESAGTVAHKVKTEVSNDLGSTHEEHKALEVFQPKGKALHKEANVSYDYFNVEEVVDMIIVELSADVKMEAHEEYQEGDDGFSLFSY

SEQ ID NO: 1144 - protein, 173 aa, Triticum aestivum
  misc_feature (80)..(80): Xaa can be any naturally occurring amino acid
  misc_feature (103)..(103): Xaa can be any naturally occurring amino acid
  misc_feature (105)..(105): Xaa can be any naturally occurring amino acid
  misc_feature (107)..(107): Xaa can be any naturally occurring amino acid
  misc_feature (117)..(117): Xaa can be any naturally occurring amino acid
  misc_feature (132)..(132): Xaa can be any naturally occurring amino acid
NNATSSGGSGSHRKMSHNAYERDRRKQLNEQYSSLRSLLPDDDHNKKMSIPTTVSRVIKYIPELQKEVDGLEKKKEELRXPATSKRHEAEHGPIVSATCLDDXEXMXKSASDTMAGXCHFKCIKVLESSSAXNPRFRFQNRFTSIFEPTNMTRRQTFLQRRTNKRGNRTYGCT

SEQ ID NO: 1145 - protein, 810 aa, Pinus radiata
MANEKNGTFDGSKSNGHSNKIGLQRSWLRRETAIPAAQFQGSLSSQKTNGLSNNIGLQWSWLQHEAAMPAAQLQDSLSSEKMNGLSDNIGSQRSWSQQEEAVPAAQLLPAAQYQGSLSSEQTITTTDGDSDDKETYSDIVLKYISDMLMDENMEDKKCMYQECSALQATVKPFYDILGENYPPQGMCSKSKIGQNQNQLLNYTKDDVPYKIEDSSWIGEFFNSQMPTGFESPLSANLSAGYSSQYSFSSSGSSTVIDGLPDSPIYEINLSEYFSENKQDSGLGEFEEASQVVPKLNMGISAENGRVMRAPKKETDLELKVGKREDAIGVPFQMNATHSDDENGPKRQKDPHREDLDLEDRQSNKHSAVYSDNVIRTESFDEVLLCGGRNGKNFADMQVQVLQNGVQKSVQNGSVKGSQGPKTVGKKQGKKEVVDLRSLLLICAQSVAADDTRGANETLKQIRQHASAYGDGSQRLANYFADGIAARLSGSGGRLFTMISSGALSSAAEILKAYQLLLVATPFKKISHFMTYQTVLNVAEGETRLHIVDFGILYGFQWPSLIQCLANRPGGPPMLRITGIEFPQPGFRPAERIEETGRRLEDYAKSFGVPFEYQAIATKWENLDVEELGLRSDEVLVVNCLGRLRNLLDETVVQDSPRNIVLNKIRSMNPRVFIQGVVNGAYNASFFITRFREALFHYSALFDALETTVPRDNQQRFLIEKEIFGREILNVVACEGSERLERPETYKQWQGRTQRAGFVQLPLDRSILSKSRDKVKTFYHKDFGVDEDGNWMLLGWKGRTIHALSTWRPST

SEQ ID NO: 1146 - protein, 297 aa, Zea mays
MATLATAAAAWTREEDKAFENAVAAAAAPPADGPPDDGWFTALVASVPARTVEEVRRHYEALVEDVAAIEAGRIPLPRYAGEESSAATPEGSGSAASAPKDAGGGGGGGGHRREERKSGVGVDVGKSSSKAEQERRKGIPWTEEEHRLFLLGLDKFGKGDWRSISRNFVISRTPTQVASHAQKYFIRLNSMNRDRRRSSIHDITSVSAGEVAAAGAPITGGPTTAGAMPMGPAGMKHHHHHPAPPMGMYGHAPMGHPVSGHMVAPAAVGTPVMFPPGHHSPYVVPVGYPAPPAKMHQ

SEQ ID NO: 1147 - protein, 203 aa, Arabidopsis thaliana
MNTSEVRVPRGNRRRKAVIDLNAVPVDQEGTSASVRTPTVPITPSQPAPTMIDVDAIEDDVIESSASAFAEAKSKSRNARRRPLMVDVESGGTTRLPANISNKRRRIPSSESVIDCEHASVNDEVNMSSRVSRSKAPAPPPEEPKFTCPICMCPFTEEMSTKCGHIFCKGCIKMAISRQGKCPTCRKKVTAKELIRVFLPTTR

SEQ ID NO: 1148 - protein, 308 aa, Triticum aestivum
  misc_feature (120)..(120): Xaa can be any naturally occurring amino acid
  misc_feature (182)..(182): Xaa can be any naturally occurring amino acid
  misc_feature (212)..(212): Xaa can be any naturally occurring amino acid
  misc_feature (227)..(227): Xaa can be any naturally occurring amino acid
  misc_feature (236)..(236): Xaa can be any naturally occurring amino acid
  misc_feature (254)..(254): Xaa can be any naturally occurring amino acid
  misc_feature (287)..(287): Xaa can be any naturally occurring amino acid
MRPEMSGGQELNLPPGFRFHPTDEELVTHYLCRRCAGAPIAVPIITEIDLYKFDPWQLPKMALYGEKEWYFFSPRDRKYPNGSRPNRAAGSGYWKATGADKPVGTPKPLAIKKALVFYAXGKAPKGEKTNWIMHEYRLADVDRSARKKNSLRLDDWVLCRIYNKKGGMEKPAAVDRKPAAMXGYGGWALGAMASSPPEQKPVMGMNANGGGXARSRFRDFPAYYDRXPSDSRPRLXHADSSCSEQVLSPGFPAXEVQSQAKISEWERSFAFGRGPREPGGRLHARAXNGGFGGDPLLQDILMYWGKPF

SEQ ID NO: 1149 - protein, 134 aa, Zea mays
  misc_feature (93)..(93): Xaa can be any naturally occurring amino acid
IDVSTQMLNQQFTEPFLAVVIDPTRTVSAGKVEIGAFRTYPKDYKPPDEPVSEYQTIPLNKIEDFADKLEQAEGQLAHSRFGGMIMPSQRKKXQEESPLAKVIKDILFNSVHPSSKASTSAPPDSSGPEPMVEA

SEQ ID NO: 1150 - protein, 111 aa, Oryza sativa
  misc_feature (90)..(90): Xaa can be any naturally occurring amino acid
YREARSVKCRTKLKQTEVDCELLKRCCETLTEENRRLHRELQQLRALTHSTAAGFFMATTLPVPAATLSICPSCERLATAAGGGASPTAXDRTNKPTVPHLFSPFAKSAAC

SEQ ID NO: 1151 - protein, 246 aa, Chrysanthemum x morifolium
MGRGKVQLRRIENKINRQVTFSKRRGGLLKKAHEISVLCDAEVALIVFSNKGKLFEFSTDSCMESILERYERYSYTERQLVATDATPRSWTLEYNKLKSRADLLQRNHRHYMGEDIESLSLKEIQNLEQQLDTGLKNIRTRKNQLLHESISELQKKGKAIQEQNTTLTKKIKEKEKDKTITENVQWEQHNYVDHDTSFLMPQPPPGLNMGGNYNQSGGGAGERADGMTNELDLSLQYSCHMRCFPS

SEQ ID NO: 1152 - protein, 476 aa, Glycine max
MHEIRDPAIRLFGQKIPFPEDVVVDKEEKEIESGEEREQEMEKYEDQGHKDAGVENVTEEELEVDPPPNAEETKNSGSSPEAIVNPKTPSIEEETEKSKGDKTEKEQGDAANSQEKTLKKPDKVLPCPRCKSMDTKFCYYNNYNVNQPRYFCKACQRYWTAGGTMRNVPVGAGRRKNKNSTSHYRHITISEALQAARIDAQNGTHLPTLKGNGRVLSFGLDAHAPICDSMASLMNLGEKKALNGTRNGFHHGFEDQRLPVPCKSGENGDDSSTTSSITISSPKGENNKSTFQQQPLPQNHGFLPQVPCIPGVPWPYTWNSPVPPPALCPSGFPLPFYPATFWNCGMPGNWNVPWFSSSSPASNLKSPSSSPNSPTLGKHSRDSDMIKQDSLHKEEASTPRNGSVLVPKTLRIDDPSEAAKSSIWATLGIKNESVSGGAMFKAFQSKKGEKNHVEASPMLMANPAALSRSLNFHENS

SEQ ID NO: 1153 - protein, 243 aa, Chrysanthemum x morifolium
MGRGRVQMKRIENKISRQVTFSKRRTGLLKKAHEISVLCDADVALIVFSTKGKLFEYSTHSSMESILERYERYSYAEKLLTAPENETQASWTLESSRLKAKIEVLERNIRHYGGEDLEPLSLRDLQSVEQQLDTALKRIRTKKNQLMHESISELHKKEKTLQERNNSLSKKLKENEKNSEQQNERVELPQPPPPPPQPQPYSVPSFATSRPFIGAAMREEELARAHHVSTTMMPLWMIRHLNQ

SEQ ID NO: 1154 - protein, 75 aa, Oryza sativa (japonica cultivar-group)
MASEWSKEENKLFEQAIAYYGEGAPDLWHKVSRAMGGTKTADEVRLHFEILVDDIKLIEARRVPFPKYNTQGAWN

SEQ ID NO: 1155 - protein, 237 aa, Chrysanthemum x morifolium
MGRGRVTLKRIENKINRQVTFSKRRSGLLKKAHEISVLCDADVALIVFSTKGKLCEYSTDSSMDRILERYERYSYAEMQLTSTHNESQGSWTLEHAKLKARIELLQKSKRHLMGEELDSLTLKELQGLEQQLDTALKHVRLRKNQLMFESISALQKKDKDMQERNNILSKQIKEKEKDAAHHDKEPQIHAAVPSLHLGILNNCDAHQAGSDWEVEDIPRPAQPLTFMPPWMVQHMSK

SEQ ID NO: 1156 - protein, 274 aa, Arabidopsis thaliana
MTPSLKPLRERQNHSFFFVSLPHPWLLKSCDYLLVSFLFSFPLLYKNQNIHSFCSIITCRFFLSFVKMASFEESSDLEAIQSHLLEDLLVCDGFMGDFDFDASFVSGLWCIEPHVPKQEPDSPVLDPDSFVNEFLQVEGESSSSSSPELNSSSSTYETDQSVKKAERFEEEVDARHYRGVRRRPWGKFAAEIRDPAKKGSRIWLGTFESDVDAARAYDCAAFKLRGRKAVLNFPLDAGKYEAPANSGRKRKRSDVHEELQRTQSNSSSSSCDAF

SEQ ID NO: 1157 - protein, 303 aa, Medicago truncatula
MGNQKQKWTAEEEEALHQGVQKYGAGKWKHILKDPQFSQKLASRSNIDLKDKWRNLNVFPGQNPKTPKGKPSGSSPAPSNATPSPSPAPGTPAASAGTPAAAAAAAAPVNVAATPQAQTTIRTPTSQPSQNDDNAAKIYPQYNSLIFEALSTIKDPNGSDLNAIISFIEQKHSLPQSQNFRRTLGAKLRRLVGQGKLEKVQNGYKIKDTSVGVKSADDSKPPAPIEMDLPGSSNNFAYDDAIKEASETLACRLADAENKSFLATAAVRETERYSKFGEENDAMLKIAEEIYAKCMLGETVRFT

SEQ ID NO: 1158 - protein, 129 aa, Triticum aestivum
GIKSAVPKTIMQLMNVEGLTRENVASHLQKYRLYVKRMQGLSNEGPSASDHIFASTPVPPSLREPQVPHAAAMAPAMYHHHPAPMGGVAAGHGGYYQQQHSGHAVYNGYGGHGHGGGVSTYPHYHHGDQ

SEQ ID NO: 1159 - protein, 154 aa, Brassica napus
MASSSSSSARGELEKMGIDQLKALKEQADLEVNLLQDSLNNIRTANARLESAAGALNDLSLRPQGKKMLVPLTASLYVPGTLDEAGKVLVDIGTGYFIEKTMEDGKDYCQRKINLLKSNYEQLFEVLAKKKSVADEAGMVLQSKVRQLQAATTS

SEQ ID NO: 1160 - protein, 248 aa, Oryza sativa (indica cultivar-group)
MAQDDEDVGLALGLSLGSGGHRRQRESRDEAPSSAAASLLTLRLPAESGGQPQVVVKREVVRAEEEEYEYEYERALYSSSAAAADDDEGCNSRKKLRLSKEQSALLEDRFKEHSTLNPKQKVALAKQLNLRPRQVEVWFQNRRARTKLKQTEVDCELLKRCCETLTEENRRLHRELQQLRALTHSTAAGFFMATTLPVPAATLSICPSCERLATAAAAAGASPTAAADRTNKPTAPHLFSPFAKSAAC

SEQ ID NO: 1161 - protein, 438 aa, Oryza sativa (indica cultivar-group)
MRISEEKPCTDQELDADQMNSSSFNSSSECENQTPSNDEMTGSESKSEAAQTEGGGSSEEKVLKKPDKILPCPRCNSMDTKFCYYNNYNINQPRHFCKSCQRYWTAGGSMRNLPVGAGRRKSKSSTANYRSILITGSNLAAPAGDAPLYQLSIKGDQTATAVKFAPDSPLCNSMASVLKIGEQSKNAKPTSTAQPRNGETQTCPASGTTSDSPRNEPVNVAVSGHQNGIVGHSGVPPMHPIPCFPGPPFVYPWSPAWNGIPAMAPPVCTAPAEPANSSDNGSTASVQWSMPPVMPVPGYFPVIPSSVWPFISPWPNGAWSSPWIQPNCSVSASSPTSTSTCSDNGSPVLGKHSRDSKPQGDDKAEKNLWIPKTLRIDDPDEAAKSSIWTTLGIEPGDRSMFRSFQSKPESREQISGAARVLQANPAALSRSQSFQETT

SEQ ID NO: 1162 - protein, 767 aa, Castanea sativa
MSPNSEDQFSNLIDEYTFNQLSPLPTTDLNFLEGPNLLSDVDLGPTSFEPSITPTDGPEGQPYDPPHVVMPPTLQADSTTSPDDNDFSETVFKYMNQILMEENIENKPCMFYDPLGLKDTEKSFYDALGQKNPPLPNQNSLESPGLSSSSGDNGTNSTSSSSTVIDALLLSDLGEHNYQPSLSPPPILGEYNAVQSNFNPTDQSQFFGNLSDDSVNHFGDGLAVMAQNIFTNSESILQFRRGLEEASKFLPKSNNLVIDLESNTVSSSEWKKGDDLMVESLVVKGEKESDSSDGSRGRKNHEREEIELEEGRSNKQTAVYVEESEETELSEMLHKVLLCTDAPPSLYGDNCEPLQNDASKASPQTKGQVQGANGGKGSRNKKQGKKKETVDLRSLLILCAQAVSTGDGRTANELLKQIRQHSTPFGDGSQRLAHFFANGLEARLAGTSVGTQMFYTSNRALSTLEKLKAYQVHLSACPFKRIAYSFSNKMIFHAAERETTLHIVDFGIQYGFQWPLLIQFLSKRPEGAPKLRITGIDLPQPGFRPAECIEETGRRLEKYCNRFNVPFEYNAIASQKWETIRIEELKIERNEVLAVNCAFRMKNLLDETVEGTSPRDAVLNLIRRMKPDIFINSIVNGSYNAPFFLTRFREALFHFSALYDVFDVTIPRDNPQRVMFEREFYGREAMNVIANEGLERVERPETYKQSQFRISRAGFKQLPLNQEIMSLFRAKMKAWYHKDFILDEDNHWMLQGWKGRIVYASSCWVPV

SEQ ID NO: 1163 - protein, 216 aa, Betula pendula
EIKRIENTTNRQVTFCKRRNGLLKKAYGLSVLCDAEVALIVFSTRGRLYEYSNNNIKSTIERYKKACSDDSGTSSMAEINAQYYQQESAKLRQQIQMLQNSNRHLMGDALTSLSIKDLKQLETRLERGISRIRSKKHEMLLSDIECLQKREIQLEDENICLRTKIAEIERLQQTNLNISGPELNAIHALSRNFFSPIMVDGDTPYSQPDQKILRLG

SEQ ID NO: 1164 - protein, 249 aa, Chrysanthemum x morifolium
MGRGRVELKRIENKINRQVTFAKRRNGLLKKAYELSVLCDAEVALIIFSNRGKLYEFCSSSSMLKTLERYQKCNYGAPETNVSAREALELSSQQEYLKLKARYEALQRSQRNLLGEDLGPLNCKELESLERQLDTSLKQIRSARTQFMLDTLTDLQKKEHALNDANRTLKQRLMEGHQVTSLHWNPHVQQEMGYDQQHEPQHQNGEAFFHPLDCGPTLQMGYPSDSLTAEAAASVAGPSCSNYMPGWYQ

SEQ ID NO: 1165 - protein, 384 aa, Glycine max
MVPWNRILTITKWKDKTQHLATNNERHKIMIKSPKEADFPLKQEGHSQSITDPEKAKASASSVAQWPRLKDPRIVRVSRAFGGKDRHSKVFTIRGLRDRRVRLSVPTAIQLYDLQDRLGLSQPSKVVDWLLDAAKHEIDELPPLPVVPSVNNFTLGHPSAVTSNEATTSNSQPNEQLLNINRSIQWEGSNQNSTWKLKPKEVSREMISTDKPNWISRSEEDKQGSNNEGPSTRVIPNINLLPRANLNHPSFLGLLNTMPHGYQWEPSAGDVSHQLGNNGFANQTDMHSINVVPFPTSTLSLSTGNSQILLCPPGTAQPYFPSHVTMDMDPRQINHYQMLSSGSQNPLANYLNHSFSLAMMTHKPLHSPNSSKSPSHKDQDFPSN

SEQ ID NO: 1166 - protein, 247 aa, Medicago sativa
MARGKIQIKRIENTTNRQVIYSKRRNGLFKKANELTVLCDAKVSIIMFSSTGKLHEYISPSASTKQFFDQYQTTVGIDLWNSHYENMQENLKKLKDVNRNLRKEIRQGMGECLNDLSMEELRLLEDEMDKALKAIRERKYKVITNQIDTQRKKFNNEREVDNRLLRDLDARAEDPRFEMMDNGGEYESVIGFSNLGPRMFALSLQPTHPNPHNGGASAASDLTTYPLLFSHFSLRIRTTNTTITFQQ

SEQ ID NO: 1167 - protein, 246 aa, Chrysanthemum x morifolium
MGKGRLELKRIENKINRQVTFAKRRNGLLKKAYELSVLCDAEVALIIFSTRGKLYEFSSTSSMLKTLERYEKSSFGPPEQRRPAKEDLQEQSSYQEYMRLKERYDALKQLERNYYGEEIDNLSTNELESLERQLHCSLKQIRTIRTQSLVDRLYEQQKMEHHLYESNKTLRLKFEEESQAEALQWEAHARANGMVYGHPQHQLSQTTHDAFYHPTGCETTLQIGYQTDMSAVTSTSMNHQMQGWPA

SEQ ID NO: 1168 - protein, 568 aa, Ostreococcus tauri
MSTAGRARADGAGENYMKPLARARGEGEGGTGGRERVTPRLSFVRRRDSAPVHPTLEDEGDADEGTGEGSAAASGANDGSGARAGDDEGPPPSAPPAPRAGDARRRTPTPSVDDPMSCAAPLPPWADAGAKRRFTLRSLPNDGTHARCHVLRKRGLFGAFPTYVLYLDGRETTTATLADAVPILVARKRKKAKCTHYVIGDDGAERAVNEAHPSYVGKLKANFIGTRFELFDAGARPRAWGAPGHLGHASDDESDEDDDVPPRRTLANIRYAVNVLGVAGPRSLAVNVMDERGDTVTTALESARPRWNPSHQAYVLDFNGRVTKPSVKNFQLAVVDSAEAEAAAEANRTSRRVVAQFGRVDDDLFTLDFAHPLGPLTAFAALSRGVRSRPARVPMGFSRARPPPDIAHARSPADAVASTSDPSYEGDGRVGESTIVGAGLGVFATRRLPRGSTARGVTYGGDVMTLLEAVAMPKKDKAYVMALHLNVHVDARRHYGYVGRYVNDSAGTANALNAEFVKDAANRRATLRTVRDVEAGEEFFAAYGKGYWERERAIEGDGVATVERSDDG

SEQ ID NO: 1169 - protein, 357 aa, Oryza sativa (japonica cultivar-group)
MGRESAAACSPKPKLRRGLWSPEEDEKLFNHISRYGVGCWSSVPKLAGLERCGKSCRLRWINYLRPDLKRGSFSQQEEELIISLHKILGNRWSQIAAQLPGRTDNEIKNFWNSCLKKKLRQRGIDPATHKPLNDGGAGAGEEHHDDGDKQQLMDDVDDCFAIGGGGSSDSLAPPHSPAVSFDPLSVTNVPTTMMQSSSSPYGAAGGEHSSFRSDTLCDYGGSGGGVDVVSDAGTYSAYTGDSSSNSNSTAWTCGSVVVGGAGELPPPPLLPHMDMFGRVDAEPPPYPPFDVQARFSPWHHHHHHHHEPTLPTPPQRLDGGGGAAASFPIRSLSRDMPESCFDLGRGALDDEFGVDFL

SEQ ID NO: 1170 - protein, 265 aa, Chrysanthemum x morifolium
MANSDAFELDFSCIDRSMSFPDESADMSPQRKLGKGKIEIKRIENTTNRQVTFCKRRNGLLKKAYELSVLCDAEVALIVFSSRGRLYEYANNSVRGTIDRYKKACLDPPSSGSVSEANAQYYQEESGKLRSQIANLQNQNRQFYRNIMGESLTDMPMKDLKNLETKLEKAITRIRSKKNELLFAEIEYMQKRELELHNNNQFLRAKIAENERSAQQQHMSLMPGSSDYELVTPHQPFDGRNYLQSNEMQPSNDYSCQDQTPLQLV

SEQ ID NO: 1171 - protein, 229 aa, Chrysanthemum x morifolium
MARGKIQIKKIENSTNRQVTYSKRRNGLFKKASELTVLCDAKVSIIMVSCTDKLHEYISPSITTKQFFDQYQKASGIDLWNSHYEKMQEVLRQLKDVNKKLRTHIRQRLGDCLDHLGFEELLDLEKESQEAVYVIRERKLKVIGNKLETSKKKVRSAQDVYKKLMHEFDIRGEDPQFGMIEDAGEYETIYGYPPHIATQRILTLRLQPNHPDNLHAATASDLTTYSLLG

SEQ ID NO: 1172 - protein, 222 aa, Picea mariana
MGRGKIEIKRIENTTNRQVTFCKRRNGLLKKAYELSVLCDAEVALIVFSSRGRLYEFANHSVKRTIERYKKTCVDNNHGGAISESNSQYWQQEAGKLRQQIEILQNANRHLMGDGLTALNIKELKQLEVRLEKGIGRVRSKKNEMLLEEIDIMQRREHILIQENEILRSKIAECQNSHNTSMLSAPEYDALPAFDSRNFLHANLIDAAHHYAHQEQTTLQLG

SEQ ID NO: 1173 - protein, 607 aa, Cryptococcus neoformans var. neoformans JEC21
MPPRRQSQASQTKGKQPAQETQDDSDEETQGGRSGPLTDADIESRAGMLVRLALFQEYKRIPIRRTEVAKQILPDNTRAFPLVFARAQTILRDTFGCELYEIRARGKGESTEDPSQTQAMTQTQKKGKGKGRQPNRGLDAIDEEEEEEDEEEEDATITQKVKRETGTKVYILQNILPGKIIEAMAEPAPLPHGIEVEGDDDDSGALLQWDKGDGGIIGHVGLLGIRTLILSLVLCHNRIINDDHLHALLRRLNLHRETVLPYASKDTTDPHLTLDKYLELLAKYQYLEKIKNPGPMGQAEGGTVEWKWGSREAEFSSKAAAKFMEEIMLGKEGESDSEEEDEDQPRRRGRGAPRERASRPQKRQKLRDDIIKAAGGVPLKPRHSAHYGQRQHPHQHLHPQQNYNHQHASMSEHGQEEYPPVPLQTGPMIAPHQDLHSFLESFWTRQMDTVEGETPDWKSYNLPLARIKKVMKSDEEVKMISAEAPIMFSKACEIFISELTCRAWLVAESHKRRTLQKSDVAAAIAYSDMFDFLIDIVPRDDGGVGGGGSGGGVGGSGTVTGAGSVVADEGMERDEDDPEGDEGEGEGEGFDGQEEEGDLYSEYVQGD

SEQ ID NO: 1174 - protein, 323 aa, Oryza sativa (japonica cultivar-group)
MDLMGGYGRVDEQVAIQEAAAAGLRGMEHLILQLSQTGTSERSPAPAQEQQQQVDCREITDMTVSKFKKVISMLNRTGNARFRRGPVVAQSSGPAASEPAPVRSSPSAVSRPMTLDFTKAASGYGKDAGFSVSGISAASSSFLSSVTGDGSVSNGRGGGSSSLMLPPPPATSCGKPPLSSAAAAMSAGAGHKRKCHDHAHSENVAGGKYGSTGGRCHCSKRRKHRVKRTIRVPAISSKVADIPADDFSWRKYGQKPIKGSPFPRGYYKCSTLRGCPARKHVERDPTDPSMLIVTYEGEHRHSPSAAGQDHPPAPPPPLALPLA

SEQ ID NO: 1175 - protein, 1268 aa, Yarrowia lipolytica CLIB122
MLRLQVYAISPCLESETVTTWAPDRSMQTRSIDEAGMRVEKKFLHFTDPRSSLLELCHEIAERFKSIYPDNFEPRIDFLQSDTGLDLSPSFVSGDVFKSGDVVRAILRLPTDIEEFRKFQGEAPGIRFLEEDVGEAGEVSKIEAQVDDSTMSRDGRKRRRYTLPKEITKRLKRDSSVYSDGFGVRDPESFDHTMEEEAIYAHTVTVRRPRSRYSQGGTGTGHNSILESSTTSLIPPPRPDFASSSTTGPSPPASNNHYPQLESSQVAAGSSTPIRLSSKLGSTVVDKGNVSNPTPVRGSTSLDTIQTPVLSPQPKAAIQGSPMKSPPHAQKAISLPPVKKEPTSKESKDKEPVAKRAKIEPRVERKPEPESDTSFLAEFSDDGKFPTALMQARAQQKAAIEESRLTQQALRLHIKSPQYHIPSELGDHISPAKAKASLNAWLGWKHAQESNSPDIELARHRLVHCTFSALAEAANKQLDIANNKVQKGQLMAYRETFSVRADNSYKCLTAEQVAAEKLAADEEVAKEVARIKARQVSKDARDTKRRVRRESTAAANAHEAAVMAAKEEHDRAEAMRAREAKVREQEGAEARKEMIEDEKARQLKLKKEEEAKKRKEEEAKKRKEEEAKKKKEEEAKKKEEEEAKKKKEEEEAKKKEEEAKKKKEEEAKKKEEAKKKEEAKKKEEEAKLLELKKKEEAKKKEEAKKKEEEAKLLELKKKEEAVRAAEEAKRKEEAKLKDAEAKEKAAKEAAKKLEVEIKEKAAQAAKGSAKAEADKKKIEEAEKAKQLEAEEAREARARLAQEQREAKAKAAQEAKEAREAKKAEQQAAREAKLRAAAEAKEARARAAAEAKEAKLRAAAEAKEAKARAAAEAREAKKMAEEAKAKKNAEAEAKQKAAESKTEVKKRTLGAAKAAPISSQDTHVSDSQAEDKMDVDSDSDSDSDSDSDSDSDSDSDSDSDSDSDSDSDSDSDSDSDSDSDNGPKPEIKAKPAAKKSSQMPPSTQPPPKVKQTAPKSSQPTPAKKAMKEESESESDSDSDDDDSDDSDSDSEDTSKKRTIVKTPAKNAKATTKPEPKTAAKPASKTEAKPASKTEAKPASKTGAKPASKAETKPTVKTEPKTAVMSEPAKTAPKATASKSSTTVKPEANGSAIKKEGEAPKKSPFSNLKSLQSLAKMGVPEVKDSIPSSQPRFSQASQKKTEKEEESDSDDDSDDSDDSDDSSDDSDDSDDSDDSDDSDEQPAAKTKRAGAGLKKKKKNSGFASLMNKFM

SEQ ID NO: 1176 - protein, 467 aa, Ustilago maydis 521
MADDHAVTSGSTSADHSPSAAVSQDAQVSGLNSMVSTSAFESAYRPQARFSFPAAAQPEIVRAYQKDTYYKDLFTSQVSDVVRSLFGTRVQHSHVSSISLVGALGYYLLSTSSIPGMGDGRGGQTLGEEYVNAIPKDVRTHRIVSLPKRLAWILLHVLGPYSLTKLYALLRRYSVTTKEKLDTAEARARARARALDKPFDPSAHNGAHRRLVNWLSKTLPPLETLQSQDGWLAYLSAAHLMLFYLGGKFYSAAQRLTGVTYISTYPKRQGYQPPSYEVLGVLLGIQLSVKLLLELRAYRRSSKAQAATAATAATAEDRDGSAEKASNAAMDPSTTVVIDRTVFSHTSQPARRLDDTQQHASNSHGADNKVVDLLYAHLPDDATDRNDSDSVAIAKLNTTAAATNAQSTLQCTLCMDQRTPHRGTSAVTECGHCFDWSCITAWIAEKPECPLCRQPLQLHRILPIYNF

SEQ ID NO: 1177 - protein, 235 aa, Triticum aestivum
  misc_feature (225)..(225): Xaa can be any naturally occurring amino acid
MARGKVQLRRIENPVHRQVIFCKRRAGLLKKARELSVLCDADIGIIIFSAHGKLYDLATTGTMDGLIERYKSASGEGVAADGCGDQRVDPRQEAMVLKQEIDLLQKGLRYIYGNRANEHMNVDELNALERYLEIWMFNIRSAKMQIMIQEIQALKSKILYMQEGMLKAANEILQEKIVEQHGLIDVGMTIADQQNGHFSTVPLLEEITNPLTILSGYSTCRGSEXGLFLLMVITP

SEQ ID NO: 1178 - protein, 246 aa, Cucumis sativus
MAPREKAVAVKPSVGNVKEVHFRGVRKRPWGRYAAEIRDPSKKSRVWLGTFDTAEEAARAYDSAARDFRGVKAKTNFPLPSDDQLLNLNNKINNINNNQSPSQSSTVESSSREQALMVDSSPLNLNLGHGIGGLTNAGPISFPFQRYQIPMIGEVFTRGIPPSNHVLYFDAALRAGMINSHPNQRLHFDRIREAVSDFRREFAGSGVQSDSDSSSVVDMNGQDLKPRGGSGGRLDLDLNFPPPESA

SEQ ID NO: 1179 - protein, 273 aa, Oryza sativa (indica cultivar-group)
MSCHGGGGGGGGGGEGALSRQGSVYSLTLNEVESHLGEPLRSMNLDDLLRTVLPAAAAAAETAGRKTVDEVWRDIQGASTGRHHATPMGEMTLEDFLSRAGVAVDGAASAAGAHWLRGHYPPPPPPTTTTTLQYVGGSGAVVDGVYNRVDGHGVAGFLSQVGVAGRKRGGGVDGVVEKTVERRQKRMIKNRESAARSRARKQAYTNELENKISRLEEENQRLREHKAVADFSTFPSCVDFLKAFLTQKLEPVMQIVPQPEPKQQLRRTTSASF

SEQ ID NO: 1180 - protein, 248 aa, Triticum aestivum
  misc_feature (156)..(156): Xaa can be any naturally occurring amino acid
APGDGEAQVEEEAATATASDGSAGGERGRKQAKGKGSKSKQPAADEPPRDYVHVRARRGQATDSHSLAERVRREKITLKMKMLQDLVPGCNKVIGKALMLDEIINYVQSLQQQVEFLSMKLSTVNPQLDFDTLSNLLHKDMNQALGPSASTVFPLXESAGTVYPLCDQADLYQSFSSGAMENQCSMGLLDMALPPAPQYPFQKQQQDFWEAGAQNGLHMDHEQSQENAGSAPNFDGQLQAADHPEIEF

SEQ ID NO: 1181 - protein, 232 aa, Glycine max
MAFQHYISRDLKTIPNAVTEAENPNGCFDCNICLDFAHEPVVTLCGHLYCWPCIYKWLHVQSDSLPPDEHPQCPVCKADISNSTMVPLYGRGHAATTAEGKTASCDVFIPPRPSASCAQALLATSQRGQHLPYRNPYQGHYFTSHPYQEEDDATSQMLNLGSHHHPVTGMFGEMVYARVFGNPENLYAYPNSYQLMGSATPRLRRQEMQAHKSLNRISIFLFCCFLLCLIVF

SEQ ID NO: 1182 - protein, 260 aa, Zea mays
MAQEDVHLDDAGLALGLSLGGGGGGGASAAARHGTSRSRLSTEAPRTLEPPSLTLSMPDEATATATGGSGGSGGAARSVSSRSVEGVKRERVDDAEGERASSTAAAARAGAGAEDDDDGSTRKKLRLTKEQSKLLEDRFKDHSTLNPKQKIALAKQLKLRPRQVEVWFQNRRARTKLKQTEVDCELLKRCCESLSEENRRLQRELQELRALKQLAGPHPHQAPSSSPAAATQGVPVPVPVPPPLYVQMQLSSCRCCRPPR

SEQ ID NO: 1183 - protein, 260 aa, Oryza sativa (indica cultivar-group)
MEDLVDELYGVDEQGSSSAAARKRRLTAEQVRALERSFEEEKRKLEPERKSELARRLGIAPRQVAVWFQNRRARWKTKQLELDFDRLRAAHDELLAGRAALAADNESLRSQVILLTEKLQANGKSPSPSPAPAEQTAVPAAPESAKSFQLEEGRCLYDAAGSTTTTNGGGGGVAMPAARVAAARAASNDSPESYFAGARSPPSSSEDDCGGAGSDDDYPSSSVLLPVDATLVGDAFEHAVAATVAADEEAPLNSWEWFWN

SEQ ID NO: 1184 - protein, 1224 aa, Arabidopsis thaliana
MDLSAKDEFSAEKRNPDNYDSVNNPSGDWRVDSYPSENLISAGPASCSPSQMMDSFGQTLWYDPTSVQAVGYAGFNGGNASSSSFRGSIDRSLEMGWNLPNLLPPKGNGLFLPNASSFLPPSMAQFPADSGFIERAARFSLFSGGNFSDMVNQPLGNSEAIGLFLQGGGTMQGQCQSNELNVGEPHNDVSVAVKESTVRSSEQAKPNVPGSGNVSEDTQSSGGNGQKGRETSSNTKKRKRNGQKNSEAAQSHRSQQSEEEPDNNGDEKRNDEQSPNSPGKKSNSGKQQGKQSSDPPKDGYIHVRARRGQATNSHSLAERVRREKISERMKFLQDLVPGCNKVTGKAVMLDEIINYVQSLQRQVEFLSMKLATVNPQMDFNLEGLLAKDALQLRAGSSSTTPFPPNMSMAYPPLPHGFMQQTLSSIGRTITSPLSPMNGGFKRQETNGWEGDLQNVIHINYGAGDVTPDPQAAATVLFVILRMASNYYSVQIKQCIGLGARNQSRYVKMIHGNIIRALPYPETFLYNNIVHAYALMKSSTYARRVFDRIPQPNLFSWNNLLLAYSKAGLISEMESTFEKLPDRDGVTWNVLIEGYSLSGLVGAAVKAYNTMMRDFSANLTRVTLMTMLKLSSSNGHVSLGKQIHGQVIKLGFESYLLVGSPLLYMYANVGCISDAKKVFYGLDDRNTVMYNSLMGGLLACGMIEDALQLFRGMEKDSVSWAAMIKGLAQNGLAKEAIECFREMKVQGLKMDQYPFGSVLPACGGLGAINEGKQIHACIIRTNFQDHIYVGSALIDMYCKCKCLHYAKTVFDRMKQKNVVSWTAMVVGYGQTGRAEEAVKIFLDMQRSGIDPDHYTLGQAISACANVSSLEEGSQFHGKAITSGLIHYVTVSNSLVTLYGKCGDIDDSTRLFNEMNVRDAVSWTAMVSAYAQFGRAVETIQLFDKMVQHGLKPDGVTLTGVISACSRAGLVEKGQRYFKLMTSEYGIVPSIGHYSCMIDLFSRSGRLEEAMRFINGMPFPPDAIGWTTLLSACRNKGNLEIGKWAAESLIELDPHHPAGYTLLSSIYASKGKWDSVAQLRRGMREKNVKKEPGQSWIKWKGKLHSFSADDESSPYLDQIYAKLEELNNKIIDNGYKPDTSFVHHDVEEAVKVKMLNYHSERLAIAFGLIFVPSGQPIRVGKNLRVCVDCHNATKHISSVTGREILVRDAVRFHRFKDGTCSCGDFW

SEQ ID NO: 1185 - protein, 213 aa, Cestrum elegans
KIENSTNRQVTYSKRRNGLIKKAKELNVLCDAKISLIMLSSTRKFHEYTSPNTTAKKMIDHYQRTLGVDIWSSHYEKMQENMRRLKEINNKLRREIRQRTGEDMSGLNLAELCHLQENISHSLTEIRERKYHVIKTQTETCKKKVKNLEERHGNLVFDLETKCEDPKYGMVENEGHYNSSMEFANGIHNLYAFRLLPNLQSQGGFGSHDLRLA

SEQ ID NO: 1186 - protein, 232 aa, Chrysanthemum x morifolium
MRGKIQIKKIENSTNRQVTYSKRRNGLFKKASELTVLCDAKVSIIMVSCTDKLHEYISPSITMKQFFDQYQKTTGIDLWNSHYQKMQEELRQQKEVNRNLRKQIRQRLGDCLEDLGFEELLALEKDSQEAVYIIRERKLKVIGNKVETSKKKVRSAQDVYKKLMHEFDIRGEDPQYGMIEDGVDYENVYGYPHMGAQHILTLRLQPDHPNNLHAIATGATTSSDLTTYGLFG

SEQ ID NO: 1187 - protein, 318 aa, Oryza sativa (japonica cultivar-group)
MAVEEASSSSGGGRGGGGGGGGEEGLSGCGGGWTREREKAFENALATVGDDEEEGDGLWEKLAEAVEGKTADEVRRHYELLVEDVDGIEAGRVPLLVYAGDGGVEEGSAGGGKKGGGGGGGGGGGGHGEKGSAKSSEQERRKGIAWTEDEHRLFLLGLEKYGKGDWRSISRNFVISRTPTQVASHAQKYFIRLNSMNRERRRSSIHDITSVNNGDTSAAQGPITGQPNGPSANPGKSSKQSLQPANAPPGVDAYGTTIGQPVGGPLVSAVGTPVTLPVPAAPHIAYGMHAPVPGAVVPGAPVNMPPMPYPMPPPTSHG

SEQ ID NO: 1188 - protein, 493 aa, Oryza sativa
MDTFPFQWPMDPAASSGLDAGFLPPPAAVAPDDGVGYYDPPAGADVDAAALPEFAAAFPPCAPDAAAAVLAMRREAEEVAGIRLVHLLMSCAGAIEAGDHALASAQLADSHAALAAVSAASGIGRVAVHFTTALSRRLFPSPVAPPTTDAEHAFLYHHFYEACPYLKFAHFTANQAILEAFHGCDHVHVIDFSLMQGLQWPALIQALALRPGGPPFLRITGIGPPSPTGRDELRDVGLRLADLARSVRVRFSFRGVAANSLDEVRPWMLQIAPGEAVAFNSVLQLHRLLGDPADQAPIDAVLDCVASVRPKIFTVIEQEADHNKTGFLDRFTEALFYYSAVFDSLDAASASGGAGNAMAEAYLQREICDIVCGEGAARRERHEPLSRWRDRLTRAGLSAVPLGSNALRQARMLVGLFSGEGHSVEEADGCLTLGWHGRPLFSASAWEAAGDGGGDNNNNSNSNVSGSSGSDSNNSGSSNGKSSGARDGSSVCL

SEQ ID NO: 1189 - protein, 344 aa, Oryza sativa (japonica cultivar-group)
MDFSGDIDDLISLQLLHDQLLGVEADACLPVAVHHDGVAAFAEHQQGFHPAAFLPQQPMTMTPAGYVDMANDQYLGAHAAAGEAEAVYRAAAAEPVMIRFGGEVSPVSDPRRPPLTISLPPTSHAWAAAEAVHPAALLQAQTAAAAADPNDFRKYRGVRQRPWGKFAAEIRDPKKRGSRVWLGTYDTAIEAARAYDRAAFRMRGAKAILNFPNEVGSRGADFLAPPPPPPPPTTSTHGKRKRHETAAADPDVEVIGESSKSVKTETYTSPASSSLASTTTSTVTSSSTSPSPSSEAAACGGGGGELFVPPMPSSWSWDQLEGFFGILSPLSPHPQMGFPEVAVN

SEQ ID NO: 1190 - protein, 216 aa, Chrysanthemum x morifolium
MVRGKTQMRRIENATSRQVTFSKRRNGLMKKAFELSVLRDAEVALIIFSPRGKLYEFANSSMQETIERYRSHVKDIQTDTSSVEDVQNLKHETAAMAKKVEALEVAKRKLLGEGLGTSTIDELVQIEQQLERSVRIIRARKMQVYNEQIEQLHAKEKMLAAENAILTEKCIIKTDKATEEMGVDLNVLESGENSDVETELFIGLPETRMKQLSWPK

SEQ ID NO: 1191 - protein, 488 aa, Zea mays
MATAAVESKRGSARGRKALVAVLDNEANISAGKAAQAADLSSCSAQKKAKRAPSRSSKAKAAAASAAVVVDDIAELQGMLERLRLEKEKAEEMVRERDEVIRKKEEEIETRDKEQERLQAELRKAQRAKEFKPTVSFPLVKSLLEKEQEADDKGKKKKGKGGHERKKPCPAYVLWLKDQWTEVKKENPEADFKEVSNTLGAKWKALGAEEKQPYEDRYRQGEGGLPGQVVGQEKREAEAMKLLEEQQMQWTAKELLDQYLKFRQEAEEGDCKKGRKKKSKKDKDPSKPKQPMSAYFVYSQERRATLVAEKKNVPEIGKITGEEWKNMTEGQRAPYEEVARKQKEEYHKQMEVYKQKKAEEAASLEKEEQEHKKIMKHEALQLLKKKEKADNIIKKTKEKRQKKKQENADPNRPKRPASSFLLFSKEERKQLIEERPGINNSTLNALITVKWKELSGEERQAWNAKAAPAMAAYKKEMEEYTKAQSSSA

SEQ ID NO: 1192 - protein, 454 aa, Oryza sativa (indica cultivar-group)
MAGGGRCSSLLRGFVSLFFLLFIHIGHAGCCFSTGSSTQTLEEDDTGHGADGRGGGGGGSKRRKISPLAFSPSVSSSTVADERSRARRRQVSSLATSVRFYLHRIFSYSSGAKNGAGAPAAEEEDEAVTTTVSSPLAQSSSCLPQRQASSSVVLSTPSSPCASPFLSPLSPQSLSITPAVPSSPHNRQIPQATTRQSSFRSFAARGDVFPCKVCGEVLSKPQQLELHQAMKHSLSELSSLDSSMNIIRMIFLAGWKPAVMPGAGEPPSVRRILRIHHNPRVLTRFEEYRDLVRARAARRCAGAGAAAVEERCVADGNERLRFYCSTMLCTLGAGVCGSPYCCTCSILRHGFAGKQADVDGIATYSSGRAAHSSLPDDVEREFAFLQVRRAMLVCRVVAGRVGRGVADDKVAYDSMVPLLPTSSFAAATRGDDDVELLVFNPRAVLPCFVIIYSC

SEQ ID NO: 1193 - protein, 222 aa, Picea mariana
MGRGKIEIKRIENTTNRQVTFCKRRNGLLKKAYELSVLCDAEVALIVFSSRGRLYEFANHSVKRTIERYKKTCVDNNHGGAISESNSQYWQQEAGKLRQQIEILQNANRHLMGDGLTALNIKELKQLEVRLEKGIGRVRSKKNEMLLEEIDIMQRREHILIQENEILRSKIAECQNSHNTNMLSAPEYDALPAFDSRNFLHANLIDAAHHYAHQEQTTLQLG

SEQ ID NO: 1194 - protein, 218 aa, Picea mariana
KIEIKRIENTTNRQVTFCKRRNGLLKKAYELSVLCDAEVALIVFSSRGRLYEFANHSVKRTIERYKKTCVDNNHGGAISESNSQYWQQEAGKLRQQIEILQNANRHLMGDGLTALNIKELKQLEVRLEKGIGRVRSKKNEMLLEEIDIMQRREHILIQENEILRSKIAECQNSHNTNMLSAPEYDALPAFDSRNFLHANLIDAAHHYAHQEQTTLQLG

SEQ ID NO: 1195 - protein, 293 aa, Zea mays
MFPSPGRAVMALGHGGQHMTASSTAGGMAASSSSTPTITFAFQQPSPPPPPTATSSLALAHPHHHGVLGYGSACLLLDHRHPTTTTSSASPSHAAPSTVVPAPTLHHHFHGHAAGAPHVSLSPPTRASPPPPHPWSTAAACEEEPEPHHDHRQQAGQGGRPPRGKGAAVSEGSAAALGVGAVRMKKAGGGGGGKARRKVREPRFCFKTMSDVDVLDDGYKWRKYGQKVVKNTQHPRSYYRCTQDNCRVKKRVERLAEDPRMVITTYEGRHVHSPSRDEDDDAARANAEMSFIW

SEQ ID NO: 1196 - protein, 222 aa, Brassica napus
MDYSSVLAEGGNEVNQEKPPPRVCPRRNSTNTKFCYYNNHSVSQPRYKCKECRRNWTHGGALRNLPIGGSGRKKKSTTIDQPFVSQAVSAEIQQVSRHRQPFLHAQETNQFVESFGGSSSGFDVDNHIGSFPEISGDGVLPFQSFPPMDRSYFHDGLFQQDYYNAESNDLIGNHLNNQSIGNHLINTSIGSYNVVSSNHNSYINQEHRDKWNQSLNNTMNMN

SEQ ID NO: 1197 - protein, 195 aa, Cimicifuga racemosa
TGIVKKARELAVLCDAEVSLIMFSSTGKLSEYISPSTTTKKIYDTYQQVTGVDLWNSHYEKMQETLKKQKESNMKLRKEIRQRIGEGLDDLSFEELRGLEQDLNGSVKVVRDRKYHTIATQTETYRKKLRNLQETHTHLVREFEARGEDPYYEGGYESLLGMSNGAAHLLPYRLQPSQPNLQDGENYGSYNLRLG

SEQ ID NO: 1198 - protein, 235 aa, Brassica rapa
MALETLNSPTSATASARPLLRYREEMEPENLEQWAKRKRTKRQRFDQSRLNQETAPSEEEYLALCLLMLARGSAVQSPLPPSSSSDHRGYKCTVCGKSFSSYQALGGHKTSHRKPASNVNVPINQEQSNNSHSNSNGGSVVINGNGVSQSGKIHTCSICFKSFSSGQALGGHKRCHYDAGNNGNGNGSSSNSVEVVGGSDGSYVDDERSSEQSATGDNRGFDLNLPADQVAVVIS

SEQ ID NO: 1199 - protein, 209 aa, Glycine max
MEMTVNGRDTEQHHHLGLGLGLGLSLGMSGTTSPVEPAAPQRALTAAAPSTLGRQQQQSWNGAGLFYPASSGEQPRSHADDRRLAALACHEMPSLRGIDVNRAPATGGARGSCGASEDEEPGASSPDSTLSSLSGKRGAPTRSGGGEQERAGAGSDDEDDSGTGGAGSRKKLRLSKDQSAVLEDSFKEHSTLNPKQNAALARQLGLRPR

SEQ ID NO: 1200 - protein, 341 aa, Triticum aestivum
  misc_feature (317)..(317): Xaa can be any naturally occurring amino acid
MEPGRLIFNTSGSGNGQMLFMDCGAGGIAGAAGMFHRGVRPVLGGMEEGRGVKRPFFTSPDDMLEEEYYDEQLPEKKRRLTPEQVHLLERSFEEENKLEPERKTELARKLGLQPRQVAVWFQNRRARWKTKTLERDFDRLKASFDALRADHDALLQDNHRLRSQVVTLTEKMQDKEAPEGSFGAAVDALEPEQAAAEAKASLANAEEHAAAAEAFEVVQQQLHVKDEERLSPGSGGSAVLDARDALLGSGCGLAGVVDSSVDSYCFPGGAGGDEYHECVMGPVAGGIQSEEDDGAGSDEGCSYYPDDAAVFFARRAXGHGHHHTDDDDQQDDGQISYWMWN

SEQ ID NO: 1201 - protein, 210 aa, Silene latifolia
MGRGKLEIKKIENKTNRQVTFSKRRNGIMKKAQELTVLCDAKVSLLMISSTHKLYHFLSPGVSLKKMYDEYQKIKGVDLWLKHWEEMQEEQRKMVELNNMLRTEISRRLGGDLEGLTLAELRGLQQEMDEAITEIRNRKYNVIKNQTGTTRKKVKNLEERHGDLLMDLEAKFGGAQFGTGDGEQGNYESASMYGNEGAAANLFALSLHPY

SEQ ID NO: 1202 - protein, 237 aa, Brassica rapa
MALETLNSPTSATASARPLLRYREEMEPENLEQWAKRKRTKRQRFDQSRLNQETAPSEEEYLALCLLMLARGSAVQSPLPPSSSSDHRGYKCTVCGKSFSSYQALGGHKTSHRKPASNVNVPINQEQSNNSHSNSNGGSVAINGNGVSQSGKIHTCSICFKSFSSGQALGGHKRCHYDAGINGNGNGSSSNSVEVVGGSDGNYVDDERSSEQSATGDNRGFDLNLPADQVAVVISKR

SEQ ID NO: 1203 - protein, 291 aa, Oryza sativa
MGRGRIEIKRIENTTSRQVTFCKRRNGLLKKAYELSVLCDAEVALIVFSSRGRLYEYSNNNNYLKKDYSVLIFLVLCVKATIDRYKKAHACGSTSGAPLIEVNAQQYYQQESAKLRHQIQMLQNTNKHLVGDNVSNLSLKELKQLESRLEKGISKIRARKNELLASEINYMAKREIELQNDNMDLRTKIAEEEQQLQQVTVARSAAMELQAAAAAQQQQQNPFAVAAAQLDMKCFFPLNLFEAAAQLWKGRNSRVFDYSLSSLSRVLKVILQEDRLWSSAGVAVFRGLLGV

SEQ ID NO: 1204 - protein, 210 aa, Silene latifolia
MGRGKLEIKKIENKTNRQVTFSKRRNGILKKAQELTVLCDAKVSLLMISSTHKLHHFLSPGVSLKKLYDEYQKIEGVDLWHKHWERMQEQQRKLLELNNMLRTEISRRIGVDLEGLTLLELRGLQQEMEEAITEIRNRKYHVIKNQTGTTRKKVKNLEERHGDLLMDLEAKFRGAHFGIGDGELRNYGGASMYGNERAAANLFALSRHPH

SEQ ID NO: 1205 - protein, 210 aa, Silene dioica
MGRGKLEIKKIENKTNRQVTFSKRRNGIMKKAQELTVLCDAKVSLLMISSTHKLYHFLSPGVSLKKMYDEYQKIKGVDLWLKHWEEMQEEQRKLVELNNMLRTEISRRLGGDLEGLTLAELRGLQQEMDEAITEIRNRKYNVIKNQTGTTRKKVKNLEERHGDLLMDLEAKFGGAQFGTGDGEQRNYESASMYGNEGAAANLFALSLHPY

SEQ ID NO: 1206 - protein, 349 aa, Oryza sativa (japonica cultivar-group)
MSGGGEGAAAAERQELQLPPGFRFHPTDEELVMHYLCRRCAGLPIAVPIIAEVDLYKFDPWHLPRMALYGEKEWYFFSPRDRKYPNGSRPNRAAGSGYWKATGADKPVGTPRPVAIKKALVFYAGKAPKGDKTNWIMHEYRLADVDRSARKKNTLRLDDWVLCRIYNKKGGVEKPSGGGGGERSNMMSHGETASAGSPPEQKPAVLPPPPPPYAAAAPFSELAAFYDVRPSDSVPRAQGADSSCSEHVLTTSASSGGVVERPEVQSHPKIAELGPQVWRVRAPRFAAEILKLRGKSVLEGWVWVGGFNPGGMNDLIFYRGGSGEPLESIGGRWMAAELLVAVRWEMEWH

SEQ ID NO: 1207 - protein, 330 aa, Triticum aestivum
MEEVFPSNSKSKAGQMAGEAIAGAEKKPRPKPEQKVECPRCKSGNTKFCYYNNYSMSQPRYFCKACRRYWTHGGSLRNVPIGGGCRKPKRSGTSDAHKLGVASSPEPTTVVPPSTCTGMNFANVLPTFMSVGFEIPSSLSLTAFGSSSSSNTAAMMSPGGTTSFLDVLRGGARGLLDGSLSQNNGYYYGGPAIGSGNGMLMTPPAVSFGIPVPMQQHGDLVVGGNGIGAATASIFQGATSEEGDDGMGGVMGLQWQPQVGNGGGGGGVSGGVHHLGTGNNVTMGNSNIHNNNNNDSGGDDNNGGSSRDCYWINNGGSNPWQSLLNSSSLM

SEQ ID NO: 1208 - protein, 169 aa, Triticum aestivum
GGARTSPIDVEALEDEVQVVSASQVPPQRRNRRPRRQPVTVVDLDVHAIRQGVSHDDNATVLSHNTRNKRPRVSPVINISPETGEGSSLQSKNAGKTSKEPVKVAPKEPIFTCPVCWNKLDEPATTMCGHIFCTNCIKQAIQYQKKCPTCRKHLKMNNFHRIYLPNTSR

SEQ ID NO: 1209 - protein, 586 aa, Arabidopsis thaliana
MEKDSIMCSGPKSNLCSSRTLTEIESRQKEEETMLLLEFAACDDLDSFKREVEEKGLDLDESGLWYCRRVGSKKMGLEERTPLMVAAMYGSIKVLTFIVSTGKSDVNRACGEERVTPLHCAVAGCSVNMIEVINVLLDASALVNSVDANGNQPLDVFVRVSRFVASPRRKAVELLLRGGGVGGLIDEAVEEEIKIVSKYPADASLPDINEGVYGSDEFRMYSFKVKPCSRAYSHDWTECAFVHPGENARRRDPRKYPYTCVPCPEFRKGSCPKGDSCEYAHGVFESWLHPAQYKTRLCKDETGCARKVCFFAHKREEMRPVNASTGSAVAQSPFSSLEMMPGLSPLAYSSGVSTPPVSPMANGVPSSPRNGGSWQNRVNTLTPPALQLNGGSRLKSTLSARDIDMEMEMELRLRGFGNNVEETFGSYVSSPSRNSQMGQNMNQHYPSSPVRQPPSQHGFESSAAAAVAVMKARSTAFAKRSLSFKPATQAAPQSNLSDWGSPNGKLEWGMKGEELNKMRRSVSFGIHGNNNNNAARDYRDEPDVSWVNSLVKDSTVVSERSFGMNERVRIMSWAEQMYREKEQTVV

SEQ ID NO: 1210 - protein, 210 aa, Glycine max
MKIQCNVCEAAEAKVLCCADEAGLCWECDEKVHAANKLASKHQRVPLSTSSSHMPKCDICQEALGYFFCLEDRALLCRKCDVAIHTANAYVSGHQRFLLTGVRVGLEATDPGASSTSLKSDSGEKVSDSSVSRKVSTAPQPSNYNEVLPAEVGGVGEFPSAKVSFGGGSTAGNISQWTIDEFIGLNEFSQNYDYMEGSSRYCRVQIHLLS

SEQ ID NO: 1211 - protein, 544 aa, Triticum aestivum
PASAHASDNMESRSTLHKVGTDMVSESEDRPREEEIIKSSISVGTSRSKISFESAEKHTTLPSGDASETENVSTDMLLRSLGKRKVLKGPRSSDDFPYKKPRMLASDIPFASHILNKHSTSEIGDTRPDIREFGGNQLDDPNKKTSNKDSCGGSPTSTTEDAARNTNKESSANNLFSSSREHTLSHWSTLERDLYLKGIEIFGKNSCLIVRNLLCGLKTCMEVASYMYNNGAANMSKSISGDFTETEQNYMEQGMVVRTKVCRRRGRTRKHKYPSKAAGHPAIRKKVGDGKQCDRQYTPCGCQEMCNKNCPCVENGTCCEKYCGCSKSCKNRFRGCHCAKSQCRSRQCPCFAASRECDPDVCRNCWVSCGDGSLGEPPERGDGYQCGNMKLLLKQQQRILLGKSDVAGWGAFIKNPVHKNDYLGEYTGELISHKEADKRGKIYDRANSSFLFDLNDQFVLDAYRKGDKLKFANHSSSPNCYAKVMMVAGDHRVGIYAREHIEASAELFYDYRYGPDQAPAWARRPEGAKKDEASGSHRRAHKVA

SEQ ID NO: 1212 - protein, 126 aa, Oryza sativa (japonica cultivar-group)
MASAAGSKQQQAMMSLPSSRGGGGGGWTQRQNKQFECALAVYDKETPDRWHNIARYMGGAKSADEVRRHFDHLVEDVSRIESGRVPFPRYSSSSSSRGADDGNRLLTVFHLSSVPRTRNANHKFNT

SEQ ID NO: 1213 - protein, 327 aa, Oryza sativa (indica cultivar-group)
MDLMSGYGRVDEQVAIQEAAAAGLRGMEHLILQLSQTGTSERSPAPAPAQEQQQQQQVDCREITDMTVSKFKKVISMLNRTGHARFRRGPVVAQSSGPAASEPAPVRSSPSAVSRPMTLDFTKAASGYGKDAGFSVSGISAASSSFLSSVTGDGSVSNGRGGGSSSLMLPPPPATSCGKPPLSSAAAAMSAGVGHKRKCHDHAHSENIAGGKYGSTGGRCHCSKRRKHRVKRTIRVPAISSKVADIPADDFSWRKYGQKPIKGSPFPRGYYKCSTLRGCPARKHVERDPADPSMLIVTYEGEHRHTPSAAGQDHPPAPPPPLALPLA

SEQ ID NO: 1214 - protein, 207 aa, Pinus taeda
GVGQTPKWPQRLKVAPERVRTFSGGSDGAFRKDTTQWVARVNHYKTLVPDLGTDKIRNVMDMNTLYGGFAAALINDPLWVMNVVSSYGLNSLNVVYDRGLIGTYNDWCEAFSTYPRTYDLLHVDGLFSAESHRCEMKYVLLEMDRILRPAGYVIMRESPHFVNSVKNLATGMRWNCHQRDTEDAKNGDQKLLICQKKDWRSSKAASE

SEQ ID NO: 1215 - protein, 203 aa, Oryza sativa (japonica cultivar-group)
MAGVGVGEGEVRYRGVRRRPSGRYAAEIRDPAKKTPIWLGTFDSAEAAARAYDAAARSLRGAAARTNFPPSTSSSAPPPPPPQHQPPQHLPPAAAAATSSHSSTVESWGVTVAAAAASAGALGLPPPRNGGSNPAADEDCRSYCGSSSSVLCEDGASGAGDEAAAPRCSPLPFDLNLPASSPSAAAAAEADEMDWRCDTLLHL

SEQ ID NO: 1216 - protein, 378 aa, Oryza sativa
MALDGKPPVPPPSTPPMDSWACGGRRSKRRGGGGGSSGSSGSSGGGGGGESEEEYLAACLLMLAHGVRDEAEVVGVAAATAKPQHGYECSVCGKVYGSYQALGGHKTSHRKPPSPAAEPAAGEEPSSGGVAGEAKVHRCSICLRTFPSGQALGGHKRLHYEGGAVGDAVKEKNSLKTKAAVATAVLKDFDLNLPAAATTAGDEAESSPPEAKRALHFWLGDGDGWHDKHAVFRWLASSSGGNNIMGPHDSPARCVEYSYSPTCRYGTFATGGCDSFMAFGMALAKVPQPSNTHVTSLLVFQQGWPSASLSHPGARSISLTFLLRYQSYETHWVSTGYTIPNGYGHGYEFLPANSIGYQSGGQKRVRHKPDAIFICNVN

SEQ ID NO: 1217 - protein, 382 aa, Zea mays
MPAPASTSTDSFLVSSQLVAAARIGGVRARASEPSLSCGRELRSSVLAFWGSAAVAMAPPPPPYARVMEDMVKGREYATQLQALLRESPEASRLVDRILHAISLTIQTAKAAAAAAEEEEEEEEASEVQSEVTCTGKRKAAGGAGKRAAACRRRAQPSSVVTKSVRDLEDGHAWRKYGQKEIQNCKHPKAYFRCTHKHDQQCAAQRQVQRRDDDPDAYTVTYIGAHTCRDPATAADDELHAGSRLISFAAANATTASTTTTTGNASNRQAGHKGAVLPAEPPRQLEGGGGGGEREQELELEEVLSSLTPAGSSAATAEAVRTATPGPDQGDVTSGLQLQQQQQHWFGGGGLSGVAHLGYDDTFDLEDIVFGSITGGMYAAEY

SEQ ID NO: 1218 - protein, 331 aa, Zea mays
QELELSLGDSRAPAKSASTPAALTPIHAGAGGEGHELALELGVGAAKRAEQDNQKTPVQPEHVQEEEEEEETCPYSESPAEVSLIGCPLLPAASAEIGSVNSSEVCVRRGFGVNAVLVDGGDAAQGRPALSTSFLPSEFLVRRQADDQEAAAEDEEMSGVGGGARKKLRLSKEQSAFLEDRLKAHSTLTPKQKSDLAKRLKLRPRQVEVLFQNRRARSKLKQTEVDCEYLKRWCEKLAQENRRLQREVADLRRLCSAAYPFYGAAAGFGVATARVCPSSCDNDVSEAAISGAPSAAAPPPSTLFASWPPHFGPFTVVVPPLLRRQPSATTS

SEQ ID NO: 1219 - protein, 162 aa, Oryza sativa
  misc_feature (85)..(85): Xaa can be any naturally occurring amino acid
YRGPFFSGNSDLAERISSRIVARGIALDDSQLDDHSESDSSSIGTAAQPSPIRNSPSRSLSFSHLSRLRGRVHTLWEWVLRKWPXGLYYHLPKRAAGIRYVFIGKPMIQRPRYQILGIFLLIQLCILGAERLRRSNLSTIASSINQISSGSYPSSRGGTFFF

SEQ ID NO: 1220 - protein, 258 aa, Oryza sativa (indica cultivar-group)
MLRTPTPTRRLLQSVGGGSNPNRIPGIPPADPPSGGVSSDVVVILAALLCALICVVGLAAVARCARNRRNSGGAGAGAGSASPSHSPAHAGHFGGGGSGGGGVTTTTTTTTAATTAAKGLKKKALKALPKLAYADAVAAAAAARGTVVGEEEEGKVEVLAECAICLSEFGEREEVRVMPQCGHGFHVACVDTWLRSNSSCPSCRRPIVLDDPSPPKRCRKCEAIVLEAVVAASSSSSSAATATGSGGGGGGGGGRFLP

SEQ ID NO: 1221 - protein, 210 aa, Silene dioica
MGRGKLEIKKIENKTNRQVTFSKTRNGILKKAQELTVLCDAKVSLLMISSTHKLHHFLSPGVSLKKMYDEYQKIEGVDLWHKHWERMQEQQRKLLELNNMLRTEISRRIGGDLEGLTLLELRGLQQEMEEAITEIRNRKYHVIKNQTGTTRKKVKNLEERHGDLLMDLEAKFRGAHFGIGDGEQRNYGGASMYGNERAAANLFALSRHPH

SEQ ID NO: 1222 - protein, 349 aa, Solanum lycopersicum
MGVQEKDPLLQLSLPPGFRFYPTDEELLVQYLCKKVAGHDFPLQIIGEIDLYKFDPWVLPSKATFGEKEWYFFSPRDRKYPNGSRPNRVAGSGYWKATGTDKVITSQGRKVGIKKALVFYVGKAPKGSKTNWIMHEYRLFESSRKNNGSSKLDEWVLCRIYKKNSSGPKPLMSGLHSSNEYSHGSSTSSSSQFDDMLESLPEMDDRFSNLPRLNSLKAEKFNLDRLDSANFDWAILAGLKPMPELGPANQAPGVQGQAQGHVNNHIHSDNNNMNFLNDVYAHPPNFRGNTKVESINLDEEVESGKRNQRIDQSSYFQQSLNGFSQAYTNNVDQFGIQCPNQTLNLGFKQ

SEQ ID NO: 1223 - protein, 227 aa, Solanum lycopersicum
RKRRLNMEQVKTLEKNFELGNKLEPERKMQLARALGLQPRQIAIWFQNRRARWKTKQLEKDYELLKRQFDAIKAENDALRNSKSKSLHAEIMSLRIESTTESINLNKETEGSCSNRSENSSEIKLDISRTPAIHSPLSNHHPNISSRPFFPPSMIRSNNNNNNNGVVVPHQLFHINSSSSRQDLKLMDQNTTTNNSSSVKEESLSNMFCGIDDQTSFWPWLEQQHFN

SEQ ID NO: 1224 - protein, 522 aa, Neurospora crassa
MGVIRKKIAARGGEGGVKYVCDVCSADITSTVRIRCAHSACNEYDLCVQCFAQGASSNAHQPQTHPYRVIEQNSFPIFDREWGADEELLLLEGAQIYGLGSWADIADHIGGYRSKDEVRDHYLQVYVDSPNFPLPKRCSPHDMELANEISREEFQARKKRRIEERREAAKNAPTLQAKTKPTASVPSCHEIQGYMPGRLEFETEFCNEAEEAVQLMQFDPGDGINPRTGELEPEMELKLTVMEIYNCRLTQRVERKKVIFEHNLLDYRENTKSEKKRSKEERDLLNKAKPFARMMNRVDFEQFCQGLIDELNLRQAIAQLQEWRSLRIGDLRSGEKYEQEKQARIQKSIPLGSMDRERLASAQRSKQPPPPDPPSGAALLVQPELPARMQSPHVIAEAEKLSSMKVEPGQVNSESVIVANGDTTPSKHKSLPQPVPGIQPLSLSQDNAPDLHLLTPEEVKLCEVLRIQPKPYLMIKEQILKEAVKGNGSLKRKQAKDICRVDQQKGGRIFDFMVNAGWVVKA

SEQ ID NO: 1225 - protein, 210 aa, Silene diclinis
MGRGKLEIKKIENKTNRQVTFSKRRNGILKKAQELTVLCDAKVSLLMISSTHKLHHFLSPGVSLKKMYDEYQKIEGVDLWHKHWERMQEQHRKLLELNNMLRTEISRRIGGDLEGLTLLELRGLQQEMEEAITEIRNRKYHVIKNQTGTTRKKVKNLEERHGDLLMDLEAKFRGAHFGIGDGEQRNYGGASMYGNERAAANLFALSRHPH

SEQ ID NO: 1226 - protein, 267 aa, Zea mays
MGSSGGAGAGQHGQMQSLARQGSLYNLTFDEVQSHLGEPLHSMNLEELLKSVFPDGLDPDGGTTSQYEQSSGLLRQGSITMLLELSKRTVDEVWKGIQDVPKRNVGEGDQQSQERERQPTLEKMTLEDFLVKAGVVAEGYLKDLNDVGNVDQVSSAGAAGPGAILESYSDGHITSPMMGALSDSPTPGRKRGSPGDVTDKLMERRQKRMVKNRESAARSTVQGLGSSLLELARISLSGQASQIHSLAQARFPQSMGAQAAQASAWLA

SEQ ID NO: 1227 - protein, 210 aa, Silene conica
MGRGKLEIKKIENKTNRQVTFSKRRNGIMKKAQELTVLCDAKVSLLMISSTHKLHHFLSPGVSLKKMYDEYQKIKGVDLWLKHWERMQEQQRKLLELNSMLRTEISRRMGGDLVGLTIEELRGLQQEMEEAVTEIRNRKYNAIKNQTGTTRKKVKNLEERHGDLLMDLEAKFRGAHFGIGEAEQRNYDVASVYGNEGAAANLFALSRHPH

SEQ ID NO: 1228 - protein, 499 aa, Oryza sativa
  misc_feature (397)..(397): Xaa can be any naturally occurring amino acid
  misc_feature (406)..(406): Xaa can be any naturally occurring amino acid
MATAAVMAAVPSSSPADAAEAVVMTEAVPSLPQRQQPVFVEGRGGKLRDHAYSRKQKSLGLLCSKWGSLVHLGDSWILAFWFPVLTEFFCAFSSFVALYNRDDVESIGLDDAARRLGVERRRIYDIVNVLESVGVSSFFLRLSWTGFLFFLARFDSDICFRFICEKILVRKAKNRYSWIGFGGVPMALRELKERALREKSGLAPLPVEEPSAAIMSDDEDEDKMGDADGDTESEKLSQPVDNPSDNKPGAPRCRLRSDHRKEKSLGLLTQNFVKLFLTMEVDTISLDEAAKLLLGEGHAENTKVRRLYDIANVLSSLNFIDKIQQADSRKPAFRWLGSAGKPKAENGVTIAVPPPGKTISNKRAFGTELTNIDINRSRLDSTIPKKAKLTKIGGKFXKNCKLSVQXQLGQVSKGGFVYGPFHPAGARKQELDNGNKGHTDNVQNWESLAASFRPQYQNQALGDLFAHYVEAWKSWYSEFAQGSSMMQQHFGMPVINQFL

SEQ ID NO: 1229 - protein, 225 aa, Brassica napus
  misc_feature (200)..(200): Xaa can be any naturally occurring amino acid
  misc_feature (210)..(211): Xaa can be any naturally occurring amino acid
  misc_feature (217)..(217): Xaa can be any naturally occurring amino acid
MASNNNPHENLSDQTPSDDFFDQILGLPNFSASSSDGGLSGGGAPPMMLQLGSGEEGSHMAGLGGSGPSVFHNQMFPLGLSLNQGKGPVFLRPEGGGVHASVNRSSSSSSMKGPVFHGQPMQQPAPAAPHQPTSIRPRVRARRGQATDPHSIAERLRRERIAERIRALQELVPTVNKTDRAAMIDEIVDYVKFLRLQVKXVLSMSRLCGXXAVAPLXTDMPFVII

SEQ ID NO: 1230 - protein, 184 aa, Oryza sativa
DDGDGGDNKKASKKGKKKKKEKDPSKPKQPMSAYFVYTQQRRAALVAEKKNVPEIGRITGEEWKAMSEAEKAPFEAAARKQREEYQVEMAAYRQRKQEEAACQEKEEEEQKKIMKQEALQLLKKKEKTDNIIKKTKEEQRKKKVGGEQRRRRRRLPLYVLLGLVLVAMDGDGGGGPNADEDSLL

SEQ ID NO: 1231 - protein, 215 aa, Triticum aestivum
MENYPILFGTQPSSSTSNSYHFVAGASSHDHLHHHGQAAGNNSSGGGGLNQGLFPGVKQEEPSNSKDGGGDDGAGSSSQGVGEADVVVGRKKGEKRERRPRFAFQTRSQVDILDDGYRWRKYGQEAVKNNNLPRSYYRCTHQGCNVKKQVQRLSRDEGVVVTTYEGTHTHPIGKSNDNFEHILTQMQVYSGINNVSQTFWQPTHVFNGTSHAWLN

SEQ ID NO: 1232 - protein, 240 aa, Triticum aestivum
  misc_feature (126)..(126): Xaa can be any naturally occurring amino acid
  misc_feature (135)..(135): Xaa can be any naturally occurring amino acid
  misc_feature (142)..(142): Xaa can be any naturally occurring amino acid
TSGRGLGSPPRAASRPPPPPPPPPRPPCPESGISAGTKRGLEHTSSGVFPAASSDEDDGGGDGAGGRKNLRMSKDQSAVLEECFKTHSALNPKQNKALANRLGLRPQQVEVWFHNRRARTKLKQTXVDCEYMKRXCEQLTEXNKRLEKEVAELRALKAAPQAHNGASEGPLTTLTMSLSRKRVASTSSASACTVPRFSANAGTGMPMPSLKEWQFFCAFRDTGAMYGGSSRLAKVVKPAR

SEQ ID NO: 1233 - protein, 196 aa, Brassica rapa
MARLLFRLLGESNSPSPVQDPSTAAVTSDLVVTLAALLCAMVCVLGLIAVSRCVWLRRLAAGNRTHAGSQGGSVQSPPPPVAAANKGLKKKVLQSLPKLTFSPDSPSSEKFTECAICLTEFSNGDELRVLPQCGHGFHVSCIDTWLGSHSSCPSCRQILVVARCHKCGGLPGSSSSEPEIEIRIKQGADVPNSYLP

SEQ ID NO: 1234 - protein, 287 aa, Oryza sativa (japonica cultivar-group)
MEAAAIHAPTTTTSSDSGSCVTNGTREKREISKHKQLKRKRSTSPAPPPGCGGGQGQEAAVETDADAGAAGEEESSSCGGAGAGEGERKRGDAGRHPSYRGVRRRSWGKWVSEIREPRKKSRIWLGTFPTAEMAARAHDVAALAIKGRAAHLNFPSLAHTLPRPASTSPSDIQAAAALAAAAAATDQCESSSSAVAAATATDAEAAESTSSAAASPCAATSSVEENALFDLPDLLLDLSDGLWCSPVWTTAPADQYDAGDDGDDAAAPLLWAEQCWMDAPAAPVQPD

SEQ ID NO: 1235 - protein, 181 aa, Brassica napus
  misc_feature (63)..(63): Xaa can be any naturally occurring amino acid
MSSRSERVVTRSSRRSNNVNGTQQSEQPRAGQQPPIVSGPPTIDVDAIEDDDDVVESTASAFXRAKRHKSGGSQRGPLVVDVESGGTTRLSKNRTKRQSDQANVDHNNPRKSKTVAPPVEEPKFNCPICMCPFTEEVSTKCGHIFCKKCIKLAVSVQAKCPTCRKRVIAKDLIRVFLPTTR

SEQ ID NO: 1236 - protein, 385 aa, Glycine max
ELKKQPILVCVSFSLQFLQSGSVWFNWIMEQTTLEAIQFNEEIQGLMAAPAPETVNSFKALLELPSTQAVELLHSPERARKPLRHSPKPPTPPPPHPPTSPSFTASASAATANLTFPSNAALIERAARFSVFAGQNSNSNSNSPEVKRELPETDSNPSSTHGGGGGGSVSDLAVENQNLKTAKRKEREKKVKASSKKSKSVAAADEISGDGEKLPYVHVRVRRGQATDSHSLAERARREKINARMKLLQELVPGCNKISGTALVLDKIINHVQSLQNEVEILSMKLAAVNPVIDFNLDSLLATEGVTPMDCNFPPTVAPVMWPEIPQNGNRQQYQQPWPFDALHQPLWGREEDNTNFMTPENSLLSYDSSANSVSLHSNQLKMEL

SEQ ID NO: 1237 - protein, 254 aa, Oryza sativa (indica cultivar-group)
MGRGRVELKRIENKINRQVTFSKRRNGLLKKAYELSVLCDAEVALIIFSSRGKLYEFGSAGCFVLAQLGDLFIIFLVGGITKTLERYQHCCYNAQDSNNALSETQSWYHELSKLKAKFEALQRTQRHLLGEDLGPLSVKELQQLEKQLECALSQARQRKTQLMMEQVEELRRKLEVEGSTSNYRAMQQASWAQGAVVENGAAYVQPPPHSAAMDSEPTLQIGYPHQFVPAEANTIQRSTAPAGAENNFMLGWVL

SEQ ID NO: 1238 - protein, 284 aa, Arabidopsis thaliana
MMFEKDDLGLSLGLNFPKKQINLKSNPSVSVTPSSSSFGLFRRSSWNESFTSSVPNSDSSQKETRTFIRGIDVNRPPSTAEYGDEDAGVSSPNSTVSSSTGKRSEREEDTDPQGSRGISDDEDGDNSRKKLRLSKDQSAILEETFKDHSTLNPKQKQALAKQLGLRARQVEVWFQNRRARTKLKQTEVDCEFLRRCCENLTEENRRLQKEVTELRALKLSPQFYMHMSPPTTLTMCPSCEHVSVPPPQPQAATSAHHRSLPVNAWAPATRISHGLTFDALRPRS

SEQ ID NO: 1239 - protein, 127 aa, Brassica napus
ETEQQIVGICGLQQSTHEAEEALSQGLEALNQSLSDSIVSDSLPPASAQFPPHLSNFMSHMSLALNKLSALEGFVLQADNLRHQTIHRLNQLLTTCQEARCILAVAEYFHRLQALSSLWLARPRQDG

SEQ ID NO: 1240 - protein, 302 aa, Triticum aestivum
  misc_feature (191)..(191): Xaa can be any naturally occurring amino acid
  misc_feature (217)..(217): Xaa can be any naturally occurring amino acid
MSGGQELNLPPGFRFHPTDEELVTHYLCRRCAGAPIAVPIITEIDLYKFDPWQLPKMALYGEKEWYFFSPRDRKYPNGSRPNRAAGSGYWKATGADKPVGTPKPLAIKKALVFYAGKAPKGEKTNWIMHEYRLADVDRSARKKNSLRLDDWVLCRIYNRKGGMEKPGVRGTRKPGGLGRAYGGGPGAMVSXSPQEQKPVMGMNANGGGGGVQPFPDXAAYYDRPSDSMPRLHADSSCSEQVLSPEFPAGEVQSQPKISEWERSFASGGDPVNPAAGSMLEPNGGFGGDPLLQDILMYWGKPF

SEQ ID NO: 1241 - protein, 151 aa, Coprinopsis cinerea okayama7#130
MSAAECPEFLLPTGREKGVEDKGMALLESTTVIRTERLWLSRRERKIWIKSSLLTWIPRAALEAQPLDYEKPGLAQHYCVECAKYFETDNALQSHWRSKVHKRRLKQLKEPAYTIEESEMAAGLGRENKRPLPSAASSVTPTVDMDIAVAA

SEQ ID NO: 1242 - protein, 422 aa, Triticum aestivum
MDPAAAAGAPAAAAQPPPPPPPPYLPPRLVIDGAGGGSGAAVRACRHHAYSRKQKSLGLLCSNFVALYDRDDVETVGLDDAARRLGVERRRIYDIVNVLESVGILVRRAKNRYTWIGFEGVPAALKELKERTLREMSGLAPPPEESSAANVSDDEDDDDKLGDADGDADSEKLSQSLDNASDKPNVPMCPPRSVDHRKEKSLGLLTQNFVKLFLTMEVETVSLDEAARLLLGERHAESNMRTKVRRLYDIANVLSSLNLIEKTQQVDSRKPAFRWLGQAKRKEGATVTVALPPSRKIMSSKRAFGTDITNIDNKRGKLVLETENKPKLMQGGSSMLKTFESQLGQGKSSGFVYGPFHPAGARKHEVDDQTVRENEMKNIQDWESLAVSFRPQYQNHALNDLFGHYVEAWKSWYLDLTRDSTS

SEQ ID NO: 1243 - protein, 212 aa, Triticum aestivum
MEESQEVEELVDTRLSLVIGAASRPPPTVLALLPAASPENEAAARGKRKGVKGPENGAGGAAAASREHSKRSKTVHDSSDVDDDDRGDAAGGDGTRKKLRLTVEQAALLEESFRAHNVLSHGEKHDLAGQLGLKPRQVEVWFQNRRARTKLKQTELDCELLRRWCERLSDDNARLRRELAETRAVLLVGGSQDSTLTGCPSCNRLAGGRRAA

SEQ ID NO: 1244 - protein, 333 aa, Triticum aestivum
MANNGMASSPSAFFPPNFLLHMQQAPPQHDPQEHHQQHHHHHHEHHLPPPHPQHNPFLPSPQCPSLQDFRGGLSPMLGKRPAMYGGGGDGGCGGDEVTGGGANEEETSDDGSQLGGEKKRRLNVEQVRTLEKNFEVANKLEPERKMQLARALGLQPRQVAIWFQNRRARWKTKQLEKDYDVLKRQFDAVKAENDALLSHNKKLQSEILGLKECREAASELINLNKETEASCSYRSENSSEINLDISGTPPSDGPMDASGPLKHQHGRRGGGMIPFYPSVARPAGVDIDHFLHASVPKMEHHHGGPDTPSFGNLLCGVDEPPPFWPWADHQQFN

SEQ ID NO: 1245 - protein, 276 aa, Glycine max
PTVHRKGSRAQFPWTQQQHQHGMGVATGASQMAYSSHYPTAPMVASGTPAVAVPSPTQAPAAFSSSAHQLAYQQAQHFHHQQQQHQQQQLQMFWSNQMQEIEQTIDFKNHSLPLARIKKIMKADEDVRMISAEAPVIFAKACEMFILELTLRSWIHTEENKRRTLQKNDIAAAISRNDVFDFLVDIIPRDELKEEGLGITKATIPLVNSPADMPYYYVPPQHPVVGPPGMIMGKPVGAEQATLYSTQQPRPPMAFMPWPHTQPQQQQPPQHQQTDS

SEQ ID NO: 1246 - protein, 206 aa, Triticum aestivum
MENYPILFGTQPSSSTSNSYHFVAGASSHDHLHHHGQAAGNNSSGGGGLNQGLFPGAKQEEPSNSKDGGGDDGAGSSSQGVGEADVVVGRKKGEKRERRPRFAFQTRSQVDILDDGYRWRKYGQKAVKNNNFPRSYYRCTHQGCNVKKQVQRLSRDEGVVVTTYEGTHTHPIEKSNDNFEHILTQMQVYSGINNVSQTFGNQHMFQ

SEQ ID NO: 1247 - protein, 221 aa, Prunus dulcis
MGRGKIEIKRIENTTNRQVTFCKRRNGLLKKAYELSILCDAEVALIVFSSRGRLYEYSNNNIRNTIEGYKKACSDSSGSTSITEINAQYYQQESAKLRQQIQMLQNSNRHLMGDALSTLSVKELKQLENRLERGINRIRSKKHEMLLAEIEYLQKKEIELENENVCLRTKISEVERLQQANMVGPELNAIQALASRNFFSQNMMEGGATYPQQDKKILHLG

SEQ ID NO: 1248 - protein, 207 aa, Oryza sativa
PRRLRGRLLLRRPPDPGGVRRRGADGGANLIHNAYERDRRKQLNELYSSLRALLPDADHTKKLSIPTTVSRVLKYIPELQKQVENLERKKKELTTTSTTNCKPGVLGSQLMSEGMAPIVSATCINDMEIMVQVSLLSNVAGSVLPLSKCIKVLENEGLHFISSSTSSGFGNRTFYSIHLQRSEGTINEECPAFCERLEKVVRNKAKL

SEQ ID NO: 1249 - protein, 940 aa, Ostreococcus tauri
  misc_feature (581)..(587): Xaa can be any naturally occurring amino acid
MDCARAFLACVTVLALARALARTPSTTIANVPAAIGMTVIGAVIARVLEHATARERELGRRSGWRGSKKERSTGGSTWTHGPDVEIVVRCFPEVWSAWVELREKIIADYVTSLWYESLTDDADVPNALRAILDEAFARLSNRAREMDLVSLVLREIPDVFSQSLEAYRSARAEIGEEEFRKLCPEDAEDILACVLKKQGELHPAVSGEIETASAFRVLTAVMADILVKKEFASPLTVPLVRELLVVSLLRPLFGFAKPHWANRGILFVTGTVVDYKEDALEKGGDNDMCVSESGENERRVETNALAQHSRSASDNSSDTMPSGLYSDFKLSARVTGAEIVGSGSSSYAVYLVTVTTNENEMWVVPRRFRNFETLHRRLREVDKVAVNALEFPSKSWIKLSLSGAFIESRWKALDAYLRAVLVNEKLAASAEVFSFMDARPGIYDPDKPSVIAPELVKTMSDAMEGMASMVTSYTVGESTDGVNEIATDEDKSNLLAKKPPLHRRISSMYEETVSTATKKSVQQMTKTSSESESGSDTNEGSEDIDEFCRSLSLVRQSVAFIFSIERSISKRFQEFRNARSXXXXXXXYDASALHVRQSVAFIFSIERSISKRFQEFRSARSMARTIAWIRRVVWPEIPYPADTPERLACEADTARQTLLGVFSNQNVKTIMGARASARAANDVFSLLQSPVCCRHVGFVALETVVCALFPEILAKCETRAPETADAAAVDARAEVGRGRAPCRTSAHKKHTTHAMPDVMCGACAEQPAAVVRVQPTTGAHACVCARCDTRYDERPSATRRGTRGGCSKTARRVHSRDERREGQNRQRGERSMQRVGLRPAGGRDELSCDVCQMNPVYVICHEDRAFLCRVCDVSIHEANSSSKRHQRFLFANTRVDLEAMGAGEDAGTRMSPSDSAAEHTVPQFEQEEVGRKVSALDDIG

SEQ ID NO: 1250 - protein, 311 aa, Brassica napus
MSTVSPCSQLVQVVPDNHNNTGDSSGVKYEDLVRNSDIFLEHLRALLGLLGNELKVPTVGGSTLDLHRLFVEVTSRGGIAKVIKDKRWREVIGVFKFPNTITSASFVLRRYYFKFLFQMEQVYYLEQSASSMKSAEEVMESLSPNLEEGTDEPQIGAVGDGVLDGKFESGYLVTMKFGSQLLKGVLYHHVKRPQQAMGTPPSGMPPASQRRAKKKARLTTVVDSQKPKCHRSGYNFFFAEQYARLKPEYHGKERIITKMIGRMWGDLSESEKQVYQDKGVKDVERYRTEMLEYKSAHESGASASAAATMAQ

SEQ ID NO: 1251 - protein, 201 aa, Brassica napus
  misc_feature (187)..(187): Xaa can be any naturally occurring amino acid
MITFEESSDLEVIHKHLFEDLMIPDGFMEDFVFDDAAFVTGLLSLEPFNPVPKQEPNSPVLDPDSCVQEFLQIEAESSSSSTTTTSPEAETVSNRKRPKRVEETRHYRGVRRRPWGKFAAEIRDPAKKGSRMWLGTFETDIDAARAYDYTAFKLRGRKAVLNFPLDAGKYDAPINSCRKRRRNDVPXPQGTTTSNSSSSSN

SEQ ID NO: 1252 - protein, 931 aa, Zea mays
MEAEAAAAVVASSASASASAGRSGPSSSAAQVTSNSAVRAGEENAASLYVLSVIDSLKKRITADRLTYIKNRIGENKTNISSYTQRTYNLSKNRQISTSKGTDSASNLLTKRQDDALCTLHSLDIIPVDKDGGTFQDESPFSSSNVMFGGNLGPKNAIIRPIKLPEVPKLPPYTTWIFLDRNQRMTEDQSVLGRRRIYYDTSCGEALICSDSEDEAIEDEEEKKEFKHSEDHIIRMTVQECGMSDAVLQTLARHMERAADDIKARYEILHGEKTKDSCKKGTEHNVKVEDLYCDKDLDAALDSFDNLFCRRCLVFDCKLHGCSQDLVFPTEKQPAWSGVDDSVPCGIHCHKLASEPDSAAGADHMLFDVEEPTHSSDNVMNQPGSNRKKNGSSGRKTKSQQSESSSTARVISESSDSEVHPISNKSPQHSPSPSKVKIGPKGGIRKITNRRIAERILMSVKKGQREMASSDSNFVSGYLLARDMKLRSDTRNGNKELIVSSQQSSPSTRSSKKKSTPQIGNSSAFAEAHNDSTEEANNRHSATDGYDSSRKEEFVNENLCKQEVYLRSWKAIEQGLLVKGLEIFGRNSCLIARNLLGGMKTCKDVFQYMNYIENNSASGALSGVDSLVKGYIKGTELRTRSRYFRRRGKVRRLKYTWKSAGYNFKRITERKDQPCRQYNPCGCQSTCGKQCPCLSNGTCCEKYCGCPKICKNRFRGCHCAKSQCRSRQCPCFAADRECDPDVCRNCWVGCGDGTLGVPNQRGDNYECRNMKLLLKQQQRVLLGRSDVSGWGAFLKNSVSKHEYLGEYTGELISHKEADKRGKIYDRENSSFLFNLNNEYVLDAYRMGDKLKFANHAPDPNCYAKVIMVTGDHRVGIFAKERILAGEELFYDYRYEPDRAPAWARKPEASGAKDDGQPFNGRAKKLAQNNRG

SEQ ID NO: 1253 - protein, 120 aa, Oryza sativa (japonica cultivar-group)
MAAVVVVDEPAATTASPAASSSNSGSGSGRGGGNKVHECSVCKKTFPTGQALGGHKRCQYEGPIGSRGGAAVAGRGFDLNLPAVALPDIMTERCLPAAAEEEEVLSPLASFKKPRLMIPA

SEQ ID NO: 1254 - protein, 330 aa, Triticum aestivum
MEQHFVHFGATTTPPPPQPKPKASPPLCYHTSSPILADDYHTSSPMSSAFDMGDTDDMHLLNTLLLHIQTGSASSHVEPAHYSLDLELDMEPSSSSTSSSSSYSSSEQQQKHHGMPTTAGQSPSNRRASQQQQPHPAPAATKGLIGVRKRPWGKFAAEIRDSTRKGARVWLGTFNTPEAAAMAYDQAAFSVRGAAAVLNYPVDRVQESLRTLALRPDVPGGSPVLALKRRHSIRKRSPNKAKKTALEPTKMMEQSGAAMPAQQQLLPVQSAGVVELEDLGADYLEELLRVSDEPSASSTMLMGAFDHHHHHHVDDQSALASTAPMLFPHC

SEQ ID NO: 1255 - protein, 291 aa, Musa balbisiana
MTDHVKWTSVESKTSTNAAPISSSSSSRSPSMASSSGAGTAVEHKRARDIRKHPVYRGVRMRAWGKWVSEIREPRKKSRIWLGTFATPEMAARAHDAAVLSVKGAPAAAAVLNFPELAGSLPRPASLSPRDVREAAARAAAMDMPRANAAALVVEDDELEEIVELPRLGQDLFGSAHLAGEFVFHDSISTASGALSFGASSKCPSCLLLHVLLLPSTAQLTRKERRNSVLLLARNRCKSISCLSPKRLSSRRNSWCSSRGTNSREQTAAIIPRLAFCSSLEDPTIIADAFH

SEQ ID NO: 1256 - protein, 328 aa, Zea mays
MLPPLSHLQRRLLAADPKFLAPPLFRSFSRATAPAARKPTTAVAVLWDLAASHPPSTLPLYDAAVRLHLAATSFGRPRLFMAFLHPSHRLPAPAASAATTHLCRVCGRRFRARDALLRHFDAIHAREHAKRLARIDSARGGRRVHLAAALSLKLSKYEKAARELTAGAGTASPSDEIGRAGVRVELSRTPAASLREHAQLVLDEGSARCLMLVSGHEELASLLRVARERGVRSVVVGGESGLARWADVGFSWAEVIAGKARCAAPSVSGKWRDLDVLKGLEWRYEDDDDEEEIVFEDGDGDGVDELARKGKGKPWWKLDSGDEDSSAG

SEQ ID NO: 1257 - protein, 359 aa, Oryza sativa (japonica cultivar-group)
MASTLSSPSPPSADPVTGSSDAASSFLPSLLIIAALLAFVLLASVSIHLLLRLLSRSSPPPPPPPPLPRTRREVHNVEAADASPVRRNGVCEGKKEVVGDEKQRLIESLPLFTMASSLAALPKSSPDCAVCLSPFTLDAELRLLPACRHAFHAACVDAWLRTTPSCPLCRATVTLPHPSISAILAAEQPPPPEPRSRDRSRSFRVEMGSVSNRSASTATGGNARPTYSLGTFDYHIDEEVEAVVSRAAPMTTRSAAAVKEDKPAAEQSPPPPGEAVAEAAGATRGWLREYVERLATSASSLSSFSGRWSSRWSQSYQSHHSHSQEEPWLWDAEAVRMSPPGTEEEETAFMVLYRWIAGV

SEQ ID NO: 1258 - protein, 255 aa, Prunus dulcis
MGRGRVQLKRIENKINRQVTFSKRRSGLLKKAQEISVLCDAEVALIVFSTKGKLFEYSTDSCMERILERYERYSYSEKQLLANDHESTGSWTLEHAKLKARVEVLQRNCSHFMGEDLQSLSLKELQNLEQQLDSAPKHIRSRKNQVMYESISELQKKDKALQEQNNLLAKKVKEKEKALAPQAESWEQQVQNQGLDCSSTLLPEALQSLNFGSGSNYQGIRNDGAGGDHEDENETPTASRPNTLLPPWMLRHLNE

SEQ ID NO: 1259 - protein, 142 aa, Brassica napus
TRPKAARSCSGGGGRRRDDERCGADGNELLRFYCSTFMCDLGQNGNSSLCGHQYCSVCGIIGSGFSPKLDGIATLATGWRGHAAVPEEVEEEFGFMNVKRAMLVCRVVAGRVGCDLIADDDVDKRDGGYDSLTGERSGSKSG

SEQ ID NO: 1260 - protein, 571 aa, Zea mays
  misc_feature (145)..(145): Xaa can be any naturally occurring amino acid
  misc_feature (261)..(261): Xaa can be any naturally occurring amino acid
  misc_feature (290)..(290): Xaa can be any naturally occurring amino acid
MASGGGAVSNKRYRQVSSCTGHDDDSCGTSRRGKTCEAAPRSGRDHDDDGESADGDGSRGHAQETADDGSSSGDEDYMFEYDDDDDDDCEGGAEQTQADAAACDGEQRYAVLTEDDVRARQEADTARVAEVLSIPPGNSSYLLRXYKWRVGRVQEEWFADERRVRGADGLPPGQFNTRSISCSTWIPTNNSCCLTGWRGYVRAAVVDGARCVSPRSPDTRCSLPVVRELVDELLLADDVGRSYARFWLRSYVEESGGRVRXWCGGPGCARALESSGGGDAAADVFCVYGXGVCWACGEEAHRPVSCATVHAWLLKNSSDSAETANWVMAHTKPCPRCGRPIEKNQGCNHMRCSPPCGHRFCWLCLQPAGGENHYACNDLRPHPPAETGVAGAGAEEKEARRLARASLERYLYHYERWVSNRAALESVARDTATLERGELEWMARAADVPATELGFVAEAYRQVAEGRRILRWAHAYGYFLDPERDVTKRGLFDDLQNQANRWLECLHASAELERKELFGAGGEAAPVDGDAFRAYRQKVANLTGVTRKFIGNLVRAFETDLSEVVAVIPAN

SEQ ID NO: 1261 - protein, 106 aa, Brassica napus
MGDTSPRTSGSTDGDMDQNNLMYDGGHVGESSDRSKEKMDQKTVRRLAQNREAARKSRLRKKAYVQQLENSRLKLTQLEQELQRARQQGVFISSSGDQAHSTTGNG

SEQ ID NO: 1262 - protein, 444 aa, Solanum lycopersicum
MAQSNSKPPMSSQNFGVGAVSHVRSLSQSSIFSNSCLPPLSPFPPSEPGMVSGRSSLKDISMEEADVNSQGVGVVSSFTRDGLPPRKGHRRSNSDVPLGFSAMIQSSPQLMPISGQKVLGRAVSLGDSNGKIDERKPKGEVTDELLFSYMNLENIETLNGSGTKDRDKDSIVSGTKVTGSESSNNEAESVMKGNNVSIQPTNLREGTKRSADANIAPAARHFRSLSMDSAIGNFHYGDESPNLPTSLMMRSGQLSPSNSGNESSSKHNLDFGNSEFSEAEMKKIMADERLAEIAVLDPKRAKRILANRLSAARSKERKTRYISELEHKVQKLQTETTTLSTQVTILQKNFVEISSLNSELKFRIQAMEQQAQLRDALHEALTAEVQRLKLAAGEHREEGRLPNNMTQQTPVKHNIFQMQRQQPSQMQQLSVGKASAASATPASA

SEQ ID NO: 1263 - protein, 207 aa, Pinus taeda
GVGQTPKWPQRLKVAPERVRTFSGGSDGAFRKDTTQWVARVNHYKTLVPDLGTDKIRNVMDMNTLYGGFAAALINDPLWVMNVVSSYGLNSLNVVYDRGLIGAYNDWCEAFSTYPRTYDLLHVDGLFSAESHRCEMKYVLLEMDRILRPAGYVIMRESPHFVNSVKNLATGMRWNCHQRDTEDAKNGDQKLLICQKKDWRSSKAASE

SEQ ID NO: 1264 - protein, 304 aa, Oryza sativa (japonica cultivar-group)
MDVEFFADLDLDALLASFSSSAAAAGSGVSGLFAPSPPHDAEAGSPESVSSRRPSPSREAALSEIERFLMEEGPAAEEGVGAEDFFDALLVDGGEEEEEEEGKGSEAGGSTDGDSGKENEVATPDAEKEDVEAEVDGDDPMSKKKRRQMRNRDSAMKSRERKKMYVKDLETKSKYLEAECRRLSYALQCCAAENMALRQSLLKDRPVGAATAMQESAVLTETLPLVSLLWLVSIVCLLPVPGLPNRNPVARSSAGRDLATVTGKKTSSEQQLEETLLLHGRRCKGSRARIKLDTGPFRLAAAAC

SEQ ID NO: 1265 - protein, 224 aa, Oryza sativa (japonica cultivar-group)
MGRGKIEIKRIENATNRQVTYSKRRTGIMKKARELTVLCDAQVAIIMFSSTGKYHEFCSPSTDIKGIFDRYQQAIGTSLWIEQYENMQRTLSHLKDINRNLRTEIRQRMGEDLDGLEFDELRGLEQNVDAALKEVRHRKYHVITTQTETYKKKVKHSYEAYETLQQELGLREEPAFGFVDNTGGGWDGGAGAGAAADMFAFRVVPSQPNLHGMAYGGNHDLRLG

SEQ ID NO: 1266 - protein, 257 aa, Arabidopsis thaliana
MACVGGKDWYFYSQRDRKYATGLRTNRATATGYWKATGKDRTILRKGKLVGMRKTLVFYQGRAPRGRKTDWVMHEFRLQGSHHPPNHSLSSPKEDWVLCRVFHKNTEGVICRDNMGSCFDETASASLPPLMDPYINFDQEPSSYLSDDHHYIINEHVPCFSNLSQNQTLNSNLTNSVSELKIPCKNPNPLFTGGSASATLTGLDSFCSSDQMVLRALLSQLTKIDGSLGPKESQSYGEGSSESLLTDIGIPSTVWNC

SEQ ID NO: 1267 - protein, 369 aa, Oryza sativa (indica cultivar-group)
MDPRFPPPAPSGGAPPRGHHRRAHSETFIRLPDADLLLDPDGEFGFSDLDFPSLSDDSPAASDPTPPPPPPALPQAAPRPPGGAHLRSLSLDAAFFDGLAFQGGGGGGGAGSGSSGGGAGHKRSGSMDGESSLFEGESAPPDYAKKAMPADRLAELALLDPKRAKRILANRQSAARSKERKIKYTGELERKVQTLQTEATTLSTQLTLLQAYWDAMIIKSVSLFLVVFILNCEYRYSSVLANCTFQDKQGHYKAIEIKESKYIYPDKQSNLLRKPSLFNAALNDALREEVQRLKIAAGQVPNMNGNSFNGGLQQQQQQQQMPTYFSQQQQMHYLSGHQGRHHHPNNPHNSLNGGQSMSGQTLNDSMDFM

SEQ ID NO: 1268 - protein, 95 aa, Fagopyrum cymosum
GRLYEYANHSVKATIDRYKKACSDSAGVTSVAEANAQYYQQEAAKLRNQIRTLQNNSRNLSRHMMGEGLSSLSMKDLKNLETRLEKGISRIRAKK

SEQ ID NO: 1269 - protein, 256 aa, Oryza sativa (japonica cultivar-group)
MERQGLDLGLSLGLGLTTAATWPAAGFCLNSGMAEQEVIRRDDVVAATAAEDERFACSPGSPVSSGSGKRGSGSGSGDEVDDAGCDVGGGGARKKLRLSKDQAAVLEECFKTHHTLTPKQKVALAKSLNLRPRQVEVWFQNRRARTKLKQTEVDCEHLKRWCDQLADDNRRLHKELAELRALKATPTPPAAAPPLTTLTMCLSCKRVANAGVPSPAAAIFPGHPQFLCGFRDHAGAASSSYGGASSGLAKAVRAAR

SEQ ID NO: 1270 - protein, 189 aa, Zea mays
MAITHDDYVSLCLMALAAAGGGGHAAAASARTTTTMTTQECELRFRCSVCGKAFASHQALGGHKASHRKPPPPLAQAPSSSSSVTTNTSSAGGSGAGQGRHRCSVCHRGFATGQALGGHKRCHYWDGLSVSLTASAASGSASSLRGFDLNLVPAAGAARWREEEEVQSPLPVKKRRLSSGPSTELSLTI

SEQ ID NO: 1271 - protein, 455 aa, Oryza sativa (indica cultivar-group)
MAAESSAAAAAGGGERRGPMDLNLYLGLPPLPPPPGRLDVAADYPSLLLNSAATVANEQRGSVVVAAPPPAAAAYSPSNALSAPEQVLVDPVAAWLVDPGEQQPVPPLETPSYMARASSTLPQIFACAALEMLVQTGGAIPPTGLIRGAEIAAASRPMTPENRLRRLIQVSDQHGVGNGRAGPGPVSRSRRANSPEADNLARAIQRSHNSLEASRRQMLDGDGSDATKKDDGCGCNGSFECNICFESAKDPVVTPCGHLFCWPCIYQWLHGHSEHSDCPVCKGEVLEVNVTPIYGRGGGEENSSRNDIQIPPRPSAQRTESLRQQLQRPDTRGGIANMVRRLMQNQDIVAGQAASSAPRPRGRGRRQARQDAPSAPATQQQVVNADAGSGNQAPLPPPDANGAAPAAAVAPQQSSSVEQASTSSTVGVIAGGPAQGRRSRVSESTPARRTRRRHQ

SEQ ID NO: 1272 - protein, 562 aa, Oryza sativa
  misc_feature (257)..(257): Xaa can be any naturally occurring amino acid
MDADEAAGSSRRMDLNLYLGLPRAPRPRRSDLGSDLALSTPMPSSPSSSAASVDAPPPPPELSHPPYSPSHADLSPPLQEVYSLYNPDDPPASETHLPPYAPPPAPVVSELPDDLEFGLHPPPPLVRASELLGWEDRPSSSTASSSFLPDTAARYWRLLEQTGSRWLRARRFRSDLPPLSSEAYPAGRDAAAVPVLQHEPMNDTVEHNKVAADGAEVGASEESEEQGRSAATFECNICFDMASEPVVTSCGHLFCWXPCLYQWLNVYSNHKECPVCKGEVTEANITPIYGRGNSCLDAEKAVEGGKQTGPTIPPRPHGNRLESFRQQFHHLRPISRRLGEAHGLLSSWRRLLDQQIMNTASRFEGPPESAVQEMVDTAHAQHTSRLSRLASRMRARRLLREADNPNPPDGGSTSPDSGLIRNNASDPSRNGPSSLLPDGIDWLRGLTLLGYEDTERFASAMSDFRRITGPSQYGASASSSNPPNLESTFDRTHVVAAPSADQASNSSTAAVIQGDAGISESAGEPSNAGSSRSLRRRGRSSALGSLDADGGGLQRNKRRRIN

SEQ ID NO: 1273 - protein, 210 aa, Arabidopsis thaliana
MDNLNVFANEDNQVNGLKRPPPSRVCPRCDSDNTKFCFYNNYSESQPRYFCKNCRRYWTHGGALRNIPVGGSCRKPKRLKVDQSSISEMVSVENQPINHQSFRQTQENNEFVRSFDASSSATVTAVPNHFGYLSELHGVTNLLPIQSFRTMDCLDFGDESFQQGYYDVGSNDLIDNPLINQSIGGYVDNLTSYCINQVEPKLQPRYEHES

SEQ ID NO: 1274 - protein, 270 aa, Zea mays
MGVPKQRWTPEEEAALKAGVAKHGPGKWRTILRDSDFSALLRLRSNVDLKDKWRNLSVTAGGYGSREKARMALKKGRRVVPKLTADPMDVDEKDMDNAHDTVIDVEPLAMAFEPLPLLESPDKSVARLDDLIVEAIRKLNEPSGSNKAVIAGYIEVNQKYRIAPSSSLGGISTKVSSSEGMNTENNNVKRLTKPQVVAELEKMKGMTREEAAAFAAKAVAEAEVAMAEAEEAARVAEAAENDAEAAKAFLDAVILSMRNRNAASMILRAC

SEQ ID NO: 1275 - protein, 217 aa, Brassica napus
MNHTLDDQNMAFISQLYPDVYTQIVPQQGEVKPPKRRRKKSKAAVASGDGSNCLFRKRKLTDEQVNMLEMSFGDEHKLESERKDKLAAELGLDPRQVAVWFQNRRARWKNKRLEEEYNKLKNSHDNVVVDKCRLESELLQLKEQLYDAEREIQRLAERVEGGSSNSPVSSSVSVEANGTPFFGDYKVGDDGDDYCNLFYPVPENIYIDGAEWMNLYI

SEQ ID NO: 1276 - protein, 322 aa, Oryza sativa (japonica cultivar-group)
MSGGGEGAAAAERQELQLPPGFRFHPTDEELVMHYLCRRCAGLPIAVPIIAEVDLYKFDPWHLPRMALYGEKEWYFFSPRDRKYPNGSRPNRAAGSGYWKATGADKPVGTPRPVAIKKALVFYAGKAPKGDKTNWIMHEYRLADVDRSARKKNTLRLDDWVLCRIYNKKGGVEKPSGGGGGERSNMMSHGETASAGSPPEQKPAVLPPPPPPYAAAAPFSELAAFYDVRPSDSVPRAHGADSSCSEHVLTTSASSGGVVERPEVQSQPKIAEWERTFAGAAAPAGAVSTAGPILGQLDPAAAVAGGGDPLLQDILMYWGKPF

SEQ ID NO: 1277 - protein, 210 aa, Medicago truncatula
MNFYSPVLKNQNQNCTENSFSNNISWEFEDYVNFFNDDINSSKNSQSLTNESLLLPSLSAESHSSLSNTTYTQVIKETQTSSSLPPQPIKESNKRVFRGIRTRPWGKFAAEIRDSTRKGARVWLGTFNTAEEAALAYDQAAYLARGSLAVLNFPEEVVKESLKEMSRNSKPLEEGTSPVLAIKRKHVMRKSPNKDIPPHTTRNSRFFAGM

SEQ ID NO: 1278 - protein, 1235 aa, Ostreococcus tauri
  misc_feature (1)..(1): Xaa can be any naturally occurring amino acid
XGVERSDARAVESWWRNNPRGWRPSPKRAMSAYLVFLNRHRERVQKKSPNASVTDITKELALKWKTVSDAERAECQRVSDQDKERYYREMRDYVPLPDEKEDEPAPRYDKDGNRKRRKKDKAAPRKNRSAYIIWAQEYREKHFRPKAATPQAVTFREQAAILGSAWKALSASGKKKYEDIALQEAQAYAIKRDAYLAEKKALALAAREAKRQRLLDEKRAWEATKEAAAKLKQERKEAKAAEKAKDDDKPKGSLSKVVAKPKKDTAMLAKIREAVMSATQSENAYYAVLDVHETEPEKVIAQYKANLEKRALPDGKTFLVNWKRVSKATPRGHFPRASIHVRGRRKNQFSTVIIISIKLQKYKSHRPSIPRARYLGAPRRHRKGAIDHSTEKKRSLEEEPISDAHVDARAPRSRRKWLRASTKKKMSPISKDFAALRLDVGASERAVKTAYKTLARELHPDKSGGDSKAFVRVQRAYERLMAKYDRDKNALRAMGTSDATTLEIGRGEDASAVAMGGDLKALGDERFEAGDHERALEYYDAAVAYARVEESSAYAELYHARARARIALERWTDAIDDTDRVIAARPLWGPSYALKGRALEGLGAWSRAAELYREQSERAMRGNADDDASHDLEREFADGLRRVEEAMARQDRMASVLAHRGRVVALAMAPPSRLDAERDVTIPANAYVATIGEDNYLKVFSVPHGECVRSVKLPVRVTSLKWSPEGDGSLVVIGQAGFVGIWRFHLSLDGKPEAKTTDSIELVGLPESVDVTAVDFDRTGEFIAVGASDGSLCVWDATHATLDLAVPAGLNAHKRGITSLAFHPVRGRNQLTTGSLDGDGRVWDLVAEATETAGECLHTLRWKGSGAVIDVNYLSCGRLIVTSTSSSASASAIMSTNRMLVWSSVSGRLCKWYDAHSSRITAFSWHPHPGSRNIAVTGCDDGVLRVWSIRASPSGAGKTILANGDYAGSLGESRGVDVKRSGAPLAVAHSPMGGLIAVSTRDGHLRIHDSDTLEATSCWRASESNAVTHVGWSPLPMSLDASERLTATSPWMVVTGGEDGQMNVWKVARGGEEDSYSDDFGDENALMKREKSALESAPAGVFTARDVKTWWDDGECASEVTPREDAFGLYLGPSPEDKPIHKALSIGEAPEQLYNPNRLSSKYLSLSLRDGESASVEAFNANEEKIRQLQSERAAFMSDETKSSVDKRAYSARFATDLKPLQEARTRLYAALQSQ

SEQ ID NO: 1279 - protein, 290 aa, Brassica napus
MMKRLSSSDSMCGLVSNSPDEQSPRGYGGNFQSMLDGYEEDGTIVEEYSGNHHHMGLSEKKRRLRVDQVKALEKNFELENKLEPERKTKLAQELGLEPRQVAVWFQNRRARWKTKQLEKDYGLLKSQYDSLRHNFDSLRRDNDSLVLKISELKAKINGEDVNNDSKVTAESDISAVKEENVPSSPPEFIEHSTGFDYRRSFTDLCDLLPNSTAPDGGSSDSCDSSAETSSENGRLTPPPTVTGGNFLQFVKTEQMEDHDEFFSGEEACGGFFSDVQPPSLNWYSASDHWT

SEQ ID NO: 1280 - protein, 248 aa, Arabidopsis thaliana
MEGGASNEVAESSKKIGRGKIEIKRIENTTNRQVTFCKRRNGLLKKAYELSVLCDAEVALVIFSTRGRLYEYANNSVRGTIERYKKACSDAVNPPTITEANTQYYQQEASKLRRQIRDIQNLNRHILGESLGSLNFKELKNLESRLEKGISRVRSKKHEMLVAEIEYMQKRVKEIELQNDNMYLRSKITERTGLQQQESSVIHQGTVYESGVTSSHQSGQYNRNYIAVNLLEPNQNSSNQDQPPLQLV

SEQ ID NO: 1281 - protein, 222 aa, Oryza sativa (japonica cultivar-group)
MARGKVQLRRIENPVHRQVTFCKRRAGLLKKARELSILCEADIGIIIFSAHGKLYDLATTGTMEELIERYKSASGEQANACGDQRMDPKQEAMVLKQEINLLQKGLRYIYGNRANEHMTVEELNALERYLEIWMYNIRSAKMQIMIQEIQALKSKEGMLKAANEILQEKIVEQNGLIDVGMMVADQQNGHFSTVPLLEEITNPLTILSGYSTCRGSEMGYSF

SEQ ID NO: 1282 - protein, 249 aa, Brassica rapa
MSNNDGVMISNGSLIEHQRQQQQQNLKQSSDGALVVKKPPAKDRHSKVDGRGRRIRMPIICAARVFQLTRELGHKSDGQTIEWLLRQAEPSIIAATGTGTTPASFSTASVSVRGSSTTISTSTNCTLSSSLDHKPFILGKRLREDSGGGKDEMGSFATPAGFWAVPARPDFGQVWSFASHQEMFLQQQQQQQQQPAAAALFVHQQQQQQAAMGEASAARVGNYLPGHLNLLASLSGGAPGSGRREDDQR

SEQ ID NO: 1283 - protein, 288 aa, Glycine max
MTDRPFFQALEKEENCDEDYEGCFHQPGKKRRLTSEQVQFLERNFEVENKLEPERKVQLAKELGLQPRQVAIWFQNRRARFKTKQLEKDYGVLKASYDRLKSDYESLVQENDKLKAEVNSLESKLILRDKEKEENSDDKSSPDDAVNSSSPHNNKEPMDLLIISKNATTTTTSENGTKVLSPLPLPIMVTCCKQEDANSAKSDVLDSDSPHCTSFVEPADSSHAFEPEDHSEDFSQDEEDNLSENLLMTFPSSCCLPKVEEHCYDGPPENSCNFGFQVEDQTFCFWPY

SEQ ID NO: 1284 - protein, 268 aa, Arabidopsis thaliana
MEVTSQSTLPPGFRFHPTDEELIVYYLRNQTMSKPCPVSIIPEVDIYKFDPWQLPEKTEFGENEWYFFSPRERKYPNGVRPNRAAVSGYWKATGTDKAIHSGSSNVGVKKALVFYKGRPPKGIKTDWIMHEYRLHDSRKASTKRSGSMRLDEWVLCRIYKKRGASKLLNEQEGFMDEVLMEDETKVVINEAERRNDEEIMMMTSMKLPRTCSLAHLLEMDYMGPVSHIDNFSQFDHLHQPDSESSWFGDLQFNQDEILNHHRQAMFKF

SEQ ID NO: 1285 - protein, 311 aa, Zea mays
  misc_feature (52)..(52): Xaa can be any naturally occurring amino acid
MGRAPCCDKNKGLKKGPWTPEEDKLLVDYIQTNGHGSWRLLPKLAGLNRCGXSCRLRWTNYLRPDIKRGPFTAEEEKSIVQLHAIVGNKWSMIAAQLPGRTDNEIKNYWNTHLKKQLRRMGLDEPPPGPAAGCPAARHMAQWETARLEAEARLSLLAATAASSGTTATTTATTTTSAASSSSTTVAGAADNKASNPADIFLRLWSSDIGDSFRRKTDTTPAVPALPAPVVKRKDTAIKQEPRALLLGLGDDSSAASNDNETEVAEALEAEYQMFLDFAGEELGLFHGRHGGFSLFPPLDVLAEASLDSAFK

SEQ ID NO: 1286 - protein, 370 aa, Solanum lycopersicum
MNSSTYTQFVASKRMGICDPIHQIGMWGDFKGSSFPDSLILEVENCLENEMPIMEKRLENEIEEPSQVTVGTSNRYEPETTKRIDKVRRRLAQNREAARKSRLRKKAYVQQLENSKLKLLQLEQELERNRQQGLYVGDGLDASQIGCSGTANSGIASFEMEYGHWVEEQDRQTDDLRNALNSQMGEIELRILVEDCLNHYFDLFRLKATAANADVLYLMSGTWKTSAERFFLWIGGFRPSELLKVLTPHVEPLSDQQIQEVSNLTQSCQQAEDALSQGMVKLHQILAEAVAAGTLGEGVILPQMTATIEKLEALVRFVNQADHLRQETLLQMSCILAPHQSAQGLLALGDYFKRLRALSSLWAGRLSEPA

SEQ ID NO: 1287 - protein, 286 aa, Arabidopsis thaliana
MYVFDPTTEAGLRLEMAFPQHGFMFQQLHEDNSQDQLPSCPPHLFNGGGNYMMNRSMSLMNVQEDHNQTLDEENLSDDGAHTMLGEKKKRLQLEQVKALEKSFELGNKLEPERKIQLAKALGMQPRQIAIWFQNRRARWKTRQLERDYDSLKKQFESLKSDNASLLAYNKKLLAEVMALKNKECNEGNIVKREAEASWSNNGSTENSSDINLEMPRETITTHVNTIKDLFPSSIRSSAHDDDHHQNHEIVQEESLCNMFNGIDETTPAGYWAWSDPNHNHHHHQFN

SEQ ID NO: 1288 - protein, 207 aa, Trollius laxus
NRQVTYSKRRTGIIKKATELAVLCDAEVSLIMFSSTGKLSEFTSPNTTTKKLFDQYQRVTGTPLWDTHYERMQESLKQQKEVNMKLRKQIRQRIGEGSLDNLSFEELRNLEQDLDTSVKAVRDRKYHMIATQTETHRKKLRNMQETHTHLVRELEARGEDPYYEGDYESSYIGMTNGGAHLLSYRLQPNQPNLQDEEGYGSYNLRLA

SEQ ID NO: 1289 - protein, 309 aa, Glycine max
YFFIMMAVARKEMDRIKGPWSPEEDEALQKLVERHGPRNWSLISRSIPGRSGKSCRLRWCNQLSPQVEHRAFTPEEDETIIRAHARFGNKWATIARLLSGRTDNAIKNHWNSTLKRKCASFMTADEAAAGGFSPRPLKRSFSAGTAVPPPGSPSGSDVSESSAAPGVVSVSVSPSQVFRPVPVRPVVETASSQDDADADAEDAGPTTSLSLSLPGVESSEISNRTSTVPVMPVHTVAAAAPVPLPAPEVGLGALNLNAEFMAVMHEMIRKEVRSYMEQQNGMMCFQGMEMMEGFRNVSVKRIGISRVDS

SEQ ID NO: 1290 - protein, 87 aa, Zea mays
  misc_feature (43)..(43): Xaa can be any naturally occurring amino acid
  misc_feature (60)..(60): Xaa can be any naturally occurring amino acid
MSAGSGSGDEDDDEGDLKNLGLSKDHAAVLEECFKTHHTFTSXQNAGLASRLGLRARKVXVWLQNRRARTKLKQTVVDCEYLRRWCE

SEQ ID NO: 1291 - protein, 1149 aa, Arabidopsis thaliana
MEVRIEMSWSVIKAKIECRDKNRDVLEMPRTPLLTLLSSYSSSGVKAFLPHTFEKEDEEEERITIPSSPSSLSYRRRRDFFRPPLLPTFSPFYFSPHFTRLLTKVFYSSLSLALFGGSIRISSEFPFMDLTGGFGARSGGVGPCREPIGLESLHLGDEFRQLVTTLPPENPGGSFTALLELPPTQAVELLHFTDSSSSQQAAVTGIGGEIPPPLHSFGGTLAFPSNSVLMERAARFSVIATEQQNGNISGETPTSSVPSNSSANLDRVKTEPAETDSSQRLISDSAIENQIPCPNQNNRNGKRKDFEKKGKSSTKKNKSSEENEKLPYVHVRARRGQATDSHSLAERARREKINARMKLLQELVPGCDKGTDFGGKIKIKVCFGVHLLMISGKKVAIFLWKIQGTALVLDEIINHVQSLQRQVEMLSMRLAAVNPRIDFNLDTILASENGSLMDGSFNAAPMQLAWPQQAIETEQSFHHRQLQQPPTQQWPFDGLNQPVWGREEDQAHGNDNSNLMAVSENVMVASANLHPNQVKMELLFELDQVKMHLLNYGSDTSYSKIQLPGDSLTLSVTDFGATGDGINYDTSAIQSTIDACNRHYTSFSSICRVVFPSGNYLTAKLHLRSGVILDVTENAVLLGGPRIEDYYPAETSSDWYVVVANNATDVGITGGGAIDGQGSKFVVRFDEKKNVMVSWNQTGACLGDECRPRLVGFVDSINVEIWNITLREPAYWCLHIVRCENTSVHDVSILGDFNTPNNDGIDIEDSNNTVITRCHIDTGDDAICPKTYTGPLYNLTATDCWIRTKSSAIKLGSASWFDFKGLVFDNITIFESHRGLGMQIRDGGNVSDVTFSNINISTRYYDPSWWGRAEPIYITTCPRDSSAKEGSISNLLFVNITIDSENGVFLSGSPNGLLSDIKFKNMNLTFRRWSNYSAGLVDYRPGCQGLVNHRATSGIIMEHVNGFRVENVDLKWSDDDDVNAAWNVPLEFRPSTVNNVSFVGFTSGLYTKLFESDYVMGGVTYPHQYITESEIGITKMASTKPLIVAAKTLRNRIHFRSGSTSTGPSRWATPGHEERPKGYFMNRTPPPPGQSRKWEDWELPCYITSFLTIVILGVGLNAKPDLSIETWAHQKALERLEMEKLASAGDSSG

SEQ ID NO: 1292 - protein, 201 aa, Oryza sativa (japonica cultivar-group)
MGRGRIEIKRIENTTSRQVTFCKRRNGLLKKAYELSVLCDAEVALIVFSSRGRLYEYSNNNNVKATIDRYKKAHACGSTSGAPLIEVNAQQYYQQESAKLRHQIQMLQNTNKHLVGDNVSNLSLKELKQLESRLEKGISKIRARKLDMKCFFPLNLFEAAAQVQAVAAQRQQIIPTELNLGYHHHLAIPGAAAADAPPPHF

SEQ ID NO: 1293 - protein, 207 aa, Pinus taeda
GVGQTPKWPQRLKVAPERVRTFSGGSDGAFRKDTTQWVARVNHYKTLVPDLGTDKIRNVMDMNTLYGGFAAALINDPLWVMNVVSSYGLNSLNVVYDRGLIGTYNDWCEAFSTYPRTYDLLHVDGLFSAESHRCEMKYVLLEMDRILRPAGYVIMRESPHFVNSVKNLATGMRWNCHQRDTEDAKNADQKLLICQKKDWRSSKAASE

SEQ ID NO: 1294 - protein, 176 aa, Perilla frutescens var. crispa
MAADEEPNTSLNKGAWTADEDGILAQYVAQHGPKRWKSLAIDAGLNRCGKSCRLRWLNYLRPDIKRGNFSDAEDDLILRFHRLLGNRWSLIAKRIPGRTDNEIKNYWNTHLRKKARLMEKLPAISVTAAMELNIWHDESSSSGTEIRDDDESFDFTAQGTSGLDWVKTFLELEEDA

SEQ ID NO: 1295 - protein, 327 aa, Arabidopsis thaliana
MDLTQGFRARSGVVGPVAGLESLNFSDEFRHLVTTMPPETTGGSFTALLEMPVTQAMELLHFPDSSSSQARTVTSGDISPTTLHPFGALTFPSNSLLLDRAARFSVIATEQNGNFSGETANSLPSNPGANLDRVKAEPAETDSMVENQNQSYSSGKRKEREKKVKSSTKKNKSSVESDKLPYVHVRARRGQATDNHSLAERARREKINARMKLLQELVPGCDKIQGTALVLDEIINHVQTLQRQVEMLSMRLAAVNPRIDFNLDSILASENGSLMDGSFNAESYHQLQQWPFDGYHQPEWGREEDHHQANFSMGSATLHPNQVKMEL

SEQ ID NO: 1296 - protein, 211 aa, Elaeis guineensis
MSTDTGRSSTESEVSGLDYEETELKLGLPGGSRTAGSETEKKRGFAETVDLSLGAESRSGDLGDRSTGDFGSGAGKPPAVKAQVVGWPPVRSFRKNALKSCTYVKVAVDGAPYLRKVDLEMYGGYQQFLTAIEDMFSCFTVRNCPNERRLVDPVNGTEYVPTYEDKDGDWMLVGDVPWKMFVASCKRLRLMKSSEAINLAPRTPQGSTRAR

SEQ ID NO: 1297 - protein, 782 aa, Oryza sativa (indica cultivar-group)
MPDLPCDGDGVCMVCRVASPPEVDLLRCSTCATPWHSPCLSKPPALADAAQWSCPDCSGDSTDAPPPAPAPLAPGSAGQLVAAIRAIECDATLSDQEKARRRQELLGGAAPAGADADDDEGDDVLEVIGKNFSCAFCMKLPERPVTVAFLTIRFYFCLGQTPCGHNFCLKCFQKWIHSGKRTCGKCRAQIPAKMAEQPRINSALVSVIRMAKVSKNANSAVSAAAYHYIRNDDRPDKAFTTERAKRAGKANASSGQIFVTIPPDHFGPILAENDPKRSIGVLVGDTWEDRLECRQWGAHFPHVAGIAGQSTHGAQSVALSGGYVDDEDHGEWFLYTGSGGRDLSGNKRTNKEQSSDQKFEKLNAALRISCLKGYPVRVVRSHKEKRSSYAPEAGVRYDGVYRIEKCWRKISVQGKFKVCSDIYGDRPRPLPKVDELKGATDISERKGTPSWDFDEKEGWKWVKPPPISRKPNLSGDPATDKEIRRVARRAQMSVAERLLKEFGCSICKQVMKEPLTTPCAHNFCKLCLVGTYGSQSSMRERSRGGRTLRAQKIVKKCPSCPTDICDFLENPQINREMMDLIESLQRKAVEEGDTKTSSDVSNGAESSGDDGNNEALEKGEDDSSLKDDGKVVKAVVVIKEEDLQPKKSKGEDEKEQGDKKMDSADVVDIAVEKKQATKRASEKAEKKQARKRKGDAVATNDGKRMKTGGDAMETAAEEDAPLSGGTPVKRNSRKSSEVDAKGGGGSPVVSSPRRVTRSSAKASGEADGSPATRTRRATRAEA

SEQ ID NO: 1298 - protein, 827 aa, Oryza sativa
  misc_feature (189)..(189): Xaa can be any naturally occurring amino acid
MAGSTLFRWLFLLLAIVSLAAADSGSGEAETTVPGQIRLSCGASASATDGDGRAWDGDAVSTFAPSVTGVAADASYQDPSLPSPVPYMTARVFSSSYTYSFPVKPGRVFLRLYFYPSAYGNLGAAAAAADALFGVTAGGITLLRDFNASQTALAVGYAYIVREFSLNVSSGATSLNVTFAPSPRGAPGXHGSHHYAFVNGIEVVPTPDMFTTPVPAFANGGRPNPMPLRADTAFQTMYRLNVGGEAITPRDDAGGFYRTWDNDAPYIFGAAFGVTFAKDSNVSVRYNPPSVPKYAAPEDVYATARSMGPNAQINLNYNLTWILPVDAGFYYLLRFHFCEIQYPITKVNQRSFFIYINNQTAQSQMDVIVWSGGIGRAVYTDYLVVTAGSGQMDLLVALHPDLSSRPEYFDAILNGLEVFKLHKYGTHSLAGPNPPIPLKQVFSTVDGSRSESRKKSVVCAAVGGVAAGCFLAVLVAFAVAWAVRRRQRKAAAEKPADGLLGPTKGSALYDPFGERYSMNTAVQGSSPPPPPPPPLPRTRREVHNVEAADASPVRRNGVCEGKKEVVGDEKQRLIESLPLFTMASSLAALPKSSPDCAVCLSPFTLDAELRLLPACRHAFHAACVDAWLRTTPSCPLCRATVTLPHPSISAILAAEQPPPPEPRSRDRSRSFRVEMGSVSNRSASTATGGNARPTYSLGTFDYHIDEEVEAVVSRAAPMTTRSAAAVKEDKPAAEQSPPPPGEAVAEAAGATRGWLREYVERLATSASSLSSFSGRWSSRWSQSYQSHHSHSQEEPWLWDAEAVRMSPPGTEEEETAFMVLYRWIAGA

SEQ ID NO: 1299 - protein, 277 aa, Medicago truncatula
MNFYPPYLKNQNQNLLYFTEDSLSNIYWELEDVVNYFNGDINFKKDSQSQTKESLLLPLSLYAESNSSFPLLSNGSLEVSYNNTTIYTQVIKETETSLSLPSKKNKNKKKTSSLASSLPLPAIKESNKRVLRGVRRRPWGKFAAEIRDSTRKGARVWLGTFNTEEEAALAYDQAAFSAKGSLAVLNFPEDVVKDSLKEMAINSEPLEEGTSPVLAIKRKIKREHIARKSSNEVSKKKIKIDHNGDRTKRETNTKSKHVFVFEDLGAEYLEQLLSLTS

SEQ ID NO: 1300 - protein, 362 aa, Triticum aestivum
MSKRPGGTKKRLKRGLWSPEEDEKLMNHVAQYGYGCWSSVAKIAGLERCGKSCRLRWINYLRPDRKRGAFSQEEEDLIIHLHSIRGNKWSQIAAQLPGRTDNEVKNFWNSFIKKKLRQRGIDPATHEHKPLAPAAPAAPATPVSRSAVFSEAELILSSPVGGPHMPPLVSAESYVYSRGSMDGAGGVVGGCSDDGSLSSLSGYNNNNQTADFAGYLDADALHGAVIPSVSSSSTLNSMAGVSPGGAANTNATTDELCCNNNPSNSGSGFESSTTQSSSNHHLPWLELGSISSCTEDASGAGAGADHYGAALDELKWSDYVFDGGYQQYHQQGQCIYGDSKAAADAAAAQFDAHGLGINWCLN

SEQ ID NO: 1301 - protein, 95 aa, Fagopyrum rubifolium
GRLYEYANQSVKATIDRYKKACSDSAGVTSVAEANAQYYQQEAAKLRNQIRTLQNNSRNLSRHMMGEGLSSLSMKDLKNLETRLEKGISRIRAKK

SEQ ID NO: 1302 - protein, 405 aa, Oryza sativa
MAAAGNSFLNQELVKVADGVSDWHLPSSSHGGATMVPQQQQTQAAGSNDNPGLVKGGWTREEDEVLRQMVRHHGDRKWAEIAKSLPGRVGKQCRERWTNHLHPDIKKDIWTEEEDRMLIEAHQTYGNSWSAIAKQLPGRSENTIKNHWNATKRSLNSKRRLRKKNSEQTVPGQPSLLESYIRSCQHMLPSETVPPPPAPFDISRYGNSGVIGASPTLPVVQEPGTSTPPGLVMFLDLLNQAIPHPPQPETMDLFNMTPEVSHLNTSGYCLQLDAGGNLYYGRLPAPAPVQPHGISTQELQDTPQLSLYYPLSSFAGSHTDGTVEFNHQLSNPNGGHYGEEAGPSSVATGGSANGMDDNDVVQMASNQFMMPSEDEGNSFLNQELLMVVNNMTDRHIMRSHGGASY

SEQ ID NO: 1303 - protein, 95 aa, Fagopyrum statice
GRLYEYANHSVKATIDRYKKACSDSAGVTSVAEANAQYYQQEAAKLRSQIRTLQNNSRNLSRHMMGEGLSSLSMKDLKNLETRLEKGISRIRAKK

SEQ ID NO: 1304 - protein, 422 aa, Zea mays
MERETVAARRSAKTMWEAVAARLRERGYRRTAEQCKCKWKNLVNRYKGKETSDPENGRQCPFFEELHGVFTERARNMQQQLLESESGVSVKTKLKRPGGDWSSRESDDKEDDGEESDDEKPMHNRKRKADDKKQQHQRMSEKSRTGISSIHELLQDFLVQQQHIDVRWREMIERRAQERKATAWTATPRTNRAAPQRQWRASRSLSSSVFAQPHHPRLILNHPTRLRLRRLGAGADALAALVFQLTVSSLPFLFPNRARVLALPPPLGAAAVVEATQEDWRRTRSGTWEAALQKWKTKTYALSVPLRKGALRGSFPPSWIKDFVEVQGKKLKFSAELRANLDGIFSEMSRCMDKGQVQPKSAMAADVVSLGDSWLGYAICKELLEPVKNAEEQDWFRRLSDRWKDWEDLWRPELAGRISMVY

SEQ ID NO: 1305 - protein, 318 aa, Triticum aestivum
  misc_feature (303)..(303): Xaa can be any naturally occurring amino acid
MASDDSSSSHPTEKKEEASAAAAAGGAGFDDLEDPRFQCCVCLELLYKPVVIACGHMSCFWCVHKAMHYARESHCAICRQPYTHFPSICQLLHHLLLKLEPVEYKKREMEVLEQERSVDTFSPQIIEFLNSKNNNGENGEDWGNKLEDGKTGPPGEVSVDDNTMNEHSMKIKLDDVSCPICKELLYQPTVLNCGHVYCISCLPSVGDEALKCQVCGGLHPGDFPNVCLDLDHFLEEYFPAEYESRRKKLQLENSQCNPEGSSSSTSCKKGTFVQKTLDLSNVHIGVGCDSCGVYPIRGKRYQXRDCTEVMLQAHTVQA

SEQ ID NO: 1306 - protein, 315 aa, Oryza sativa
GGGRGGGGERVSGREMGAPKQRWTAEEEAALKAGVAKHGTGKWRTILRDPEFTALLRLRSNVDLKDKWRNLSVTAGGYGSRERARVALKGGKRGPKALAEPMDADEKNPDIDDNAIIDAQPLAVVVEPMQLESTPEKEKSVARLDDLILEAIKKLKEPSGSNRTTISSYIEEQYWPPEDFQRLLSTKLKALVATGKLIKVNQKYRIAPSSNSSGGKSIKVYSTGEMNIENNNVRQLSKPQVDAELDKMKSMSKEEAASFAARAVAEAEAAIAEAEEAARAAEAAEAEADAAKAFLDAVVTTMQNRNHASAMLRAC

SEQ ID NO: 1307 - protein, 321 aa, Avena sativa
MMTMDLMGRYGRADEQVAIQEAAAAGLRGMEHLILQLSRTGTGTGTSESSLAGASEPAAQGQQQQQQVDCREITDMTVSKFKKVISILNHRTGHARFRRGPVVAQSQGPSVSEPAPVRTASSSRPMTLDFSKSASVFGNKDAAYSVSAASSSFLSSVTGDGSVSNGRGGGSSLMLPPPPSASCGKPPLAAAAAGPKRKCHEHAHSENVAGASGGRCHCSKRRKSRVKRMTRVPAISSKAAEIPADDFSWRKYGQKPIKGSPYPRGYYKCSTVRGCPARKHVERDPSDPSMLIVTYEGDHRHTPGDQEAAAALTPLPELHKL

SEQ ID NO: 1308 - protein, 250 aa, Brassica napus
MDIPYYHYDHGGDSQYLPPGFRFHPTDEELITHYLLRKVIEGCFSSRAIAEVDLNKSEPWQLPGKAKMGEKEWYFFSLRDRKYPTGLRTNRATEAGYWKATGKDREIYSSKTCALVGMKKTLVFYKGRAPKGEKSSWVMHEYRLEGKFSYHFISRSSKDEWVISRVFKKPGLANTGGSAEASISVSNGTGTSKKTKIPSNIFTNYREQPSSPSSVSLPPLLDPTTTLGYTDSSWSYDSRSTNTPVITTRI

SEQ ID NO: 1309 - protein, 501 aa, Avena sativa
MAMTPPTSFPPASPSSYFNNMSTGFLDSPILLTPSLFPSPTTGSFPLEPLNWMGTAPESNDGLQLGSVKDGQQRQYSGFTFQTTAAPVPAAMPGTNTTASSFLQSSMPMAQQGHDSYTGEQQQPWSYQDAGSMDAMTTRPASFSTPYEAPDMVGNGGYNNAPVSSSGTTAGYGRVQSRRPSSDDGYNWRKYGQKQMKGSENPRSYYKCSFAGCSTKKKVEQAPDGQVTEIVYKGTHNHPKPQNPRRSSAPASSSYASPDASSDALSGTPENSSASYGDDETNGVSSALAGQFGGGGEEFADNEPDSKRWRTDSDAEGVPVGANRTVREPRVVVQTMSDIDILDDGYRWRKYGQKVVKGNPNPRSYYKCTTAGCPVRKHVERASQDLRAVVTTYEGKHNHDVPALRGSAAAAARYRAAPMQAASYLQGGGGGYSSLRPDGFGGGAPAQPADQSGFALSGFDYNNSSYSYSGMQQQNDAMYYDAARTKDEPRDDMFFEQSLMF

SEQ ID NO: 1310 - protein, 87 aa, Oryza sativa (japonica cultivar-group)
MSSRSSSSSRNSNSVNMDSEWSKKENKLFEEALAYYGEGAPDLFHKVSRAMGGTKTADEVRRHYEILEDDLKLIEARRVPFPKGGSI

SEQ ID NO: 1311 - protein, 534 aa, Pinus taeda
MGRHSCCYKQKLRKGLWSPEEDEKLVRHITKYGHGCWSAVPKQAGLQRCGKSCRLRWINYLRPDLKRGTFSPQEENLIVELHSVLGNRWSQIATHLPGRTDNEIKNLWNSCIKKKLRQRGIDPNTHRPLSEVNAEAGDSKNDNSNKKVETQAAMDESHVSAGNEFKHLNAIPRADTANPKFFHVPVEDNTLIASDSQAMLQNGFINSNSTTTTTTATSTASAANFSLPKEFFLERFNSVNATPTSVEAGFNFINQTTSTQGFTGERDQKLIDNPVLWVLQAPNRSVGFPTENLMPWPGQGLAKAVSDAFSDFSSDVCDYNSIMANPSMYRPGPCLSSLLYSERSLDQDLLDNAGTNCMNGSGAAGSAQYWDNTDNNNNNNVRSSSRSSSCNSSTANLEVNNGAAFGHFWGFGERLDATDITSENERKAPLFLERADQSEYAVKWSEMLPPFSSHTQEETLPIYITTDSKSQDLVSSENINNPNHAALNSAIFPISWQQLQNTEYPVLGDRTATMLSTPLSDPDFHRIAAVLDQI

SEQ ID NO: 1312 - protein, 163 aa, Oryza sativa (japonica cultivar-group)
MSQLPLASQATTTDLVSTTAMQPQSEGIVDESLQPQHPPSSTAHDSPCLQDSVPLVPPPPSPYLNKEVGQMVCGSCRILLAYFRGAGYVHCTCCQTMNYVLEAHEVGKVHCGHCATLLMYPFGAPAVKCSLCLFVTEIGERNVRRRLSIEQPTRTNSSGLAEA

SEQ ID NO: 1313 - protein, 241 aa, Sinapis alba
MGRGRVQLKRIENKINRQVTFSKRRSGLLKKAHEISVLCDAEVALVIFSSKGKLFEYSTDSCMEKILERYDRYLYSDKQLVGRDISQSENWVLEHAKLKARVEVLEKNKRNFMGEDLDSLSLKELQSLEHQLHAAIKSIRSRKNQAMFESISALQKKDKVLQDHNNALLKKIKEREKNTVHQEVQLIQCSNNSSILQPQYCLTSSRDGFVGRVEGENEGASSLAEPNSLLPAWMLRPTTNE

SEQ ID NO: 1314 - protein, 374 aa, Pinus taeda
MAMSNGRLCEDLDRIKGPWSPEEDASLQRLVQKYGPRNWTLISKGIPGRSGKSCRLRWCNQLSPQVEHRPFTPSEDAAILQAHAQHGNKWATIARALPGRTDNAIKNHWNSTLRRRCRDPEKGIVVHLDDEISSLDAARKRSSDGFSHDGSSALEDNGCSSWEVDSKRLKRLGELGTEQGPEVEAEVEVSDRSDANPGRVLYRPVPVVSFFSSFGKTVANLQETAAGAVGVDPPTSLSLSLPGLDPAIPSPKLSTQKDSHNNSTVNNNIPIPPVVEYMRADEAVVERLSTAVKATVASMLTPVLNSSPRGYNPPAVSSDVLALMRDMVAKEVQKYMSSHHQPGMYTPLSPHPEFLGAANLVRNVVLGGALHLNK

SEQ ID NO: 1315 - protein, 294 aa, Oryza sativa (japonica cultivar-group)
MAGQQPQQQGPPEDDFFDQFFSLTSSFPGAAPGGRAAGDQPFSLALSLDAAAAAEASGSGKRLGVGDDAEGGGSKADRETVQLTGLFPPVFGGGGVQPPNLRPTPPTQVFHPQQSKQGGAAVGPQPPAPRPKVRARRGQATDPHSIAERLRRERIAERMRALQELVPNTNKTDRAAMLDEILDYVKFLRLQVKVLSMSRLGGAGAVAQLVADIPLSVKGEASDSGGNQQIWEKWSTDGTERQVAKLMEEDIGAAMQFLQSKALCMMPISLAMAIYDTQQTQDGQPVKHEPNTPS

SEQ ID NO: 1316 - protein, 250 aa, Solanum tuberosum
MGRGRVQLKRIENKINRQVTFSKRRSGLLKKAHEISVLCDAEVGLIVFSTKGKLFEYANDSCMERLLERYERYSFAERQLVPTDHTSPGSWTLEHAKLKARLEVLQRNQKHYVGEDLESLNMKELQNLEHQLDSALKHIRSRKNQLMHESISVLQKQDRALQEQNNQLSKKVKEREKEVAQQNQWDQQNHEINSSTFVLPQQLDSPHLGEAYQNTNVVDNGEVEGGNSSQQQGAANNTVMPQWMLRHLNG

SEQ ID NO: 1317 - protein, 224 aa, Solanum lycopersicum
MGRGRVELKRIEGKINRQVTFAKRRNGLLKKAYELSVLCDAEVALIIFSNRGKLYEFCSSSSMLKTLERYQKCNYGAPEPNISTREALEISSQQEYLKLKGRYEALQRSQRNLLGEDLGPLNSKELESLERQLDMSLKQIRSTRTQLMLDQLTDYQRKEHALNEANRTLKQRLMEGSQLNLQCSQMHKLWAMAGKQLKLRAMASFILWIVNLLCKLGIRMIQLQ

SEQ ID NO: 1318 - protein, 1437 aa, Zea mays
MAITPQTMVLLSLLLSLSSLPIALALAEAGAESEDTAALLAFKAAAVGSSSGTSGAVLASWNGSGAGPCTWDGVKCSRIGRVVALRLRSLGLSGTLSPAVGNLSSLRELDLSSNWLRGEIPASLGRLRRLRTLDLSVNTLSGAVPGNLTACTSLRYLNLGSNRLSGHVPAGLGGALARLEVLWLTNNSVTGALPASLANLTSLRQLGLGLNALDGPIPPELGRNMARLEYVDLCHNHLRGEIPAPLYNVSSLASLDVGQNALHGGIPAGIHVQLPRLRYLALFENHFSGAIPPTISNLTQLVELELSENRFSGLVPRDLGRLQDLWKLLLDDNMLEAGDKMEGWEFMESLANCSKLNLFGLGGNDFTGDLPASVAKLSTTLEWLYLENLAISGSIPSEIGNLVGLKVLVLTDTDISGAIPDSIGRMENLVELHLDNNSLSGPVPSSVGNLTKLMKLSASGNSLGGSIPRNLGKLTDLTSLDLSSNHLNGSIPEETFQLQSLSLLLDLSHNSLSGPLPPNVGRLANLNTLRLSGNQLSGQLPAGIRDCVVLEELLLDSNSFQGSIPEALGDIKGLRVLNLTMNGFSGAIPDALGSIRSMQQLYVARNSLSGPIPADLQNLTSLSDLDLSFNDLQGEVPDRGFFRNLPRSSVAGNENLCGGMPRLRLHPCPTSASGKNSRSKRWPPLKHVEMALATVGAVVFLASLLAAATQLVVCRSRKQRRQQTKRQPLGAPAATGERYERVSYKELSEGTKGFSDANLLGRGSYGTVYRCVLSRLTDDGGRTVAASAAAVAVKVFDLERSGSTRSFVAECEALRSARHRCLVRTITCCSSVDRQGQEFKALVFELMPNGNLSRWLHPSPNEADPESTLSLIQRLDIAVDVVDALDYLHNHCRPPIVHCDLKPSNVLLAQDMSARVGDFGLSRILSDSDSACRAKAADPNSSSVIGIRGSVGYVPPEYGEGSGVSTLGDVYSLGILLLEMFTGRSPTDDAFGDSLDLRGFSEAGFPGRILEIADPNLWAHLPDTVTRNRVRECLLAVIRLALSCSKRQPKDRTPVRDAATEMRAIRDEAYLMMLAGSVVDDVGYDVMSLYCYSCGKMSSYLNNTRELFLLAASGRVCWRVCLHGALLRLQQQWFRTPEHDRRATANMKVWVPVVVPGGGGTPTTQTQQQQQQQPPPPPEPGVRCPRCDSPNTKFCYYNNYSLSQPRHFCKTCRRYWTKGGALRNVPVGGGCRKNKRSRSAAAARLSLNLPPEAGADQQEASPGFLGGGGPAADYHQQQANAAVVGMMMTLPRLHVARRRRPQQRLATMLLGAPPSSAAAAHADDDDGAARAAAHVGGGAFLQVAPGPSPGMEATGTVPPPVATSSWFMDSSCYDVLPSSPAAHANTAAAAAAVGASDCNVVNSGGGDNATSRNSSNCCGPGSAIPPWGDMSTFAMLP

SEQ ID NO: 1319 - protein, 386 aa, Triticum aestivum
MSAGDPAGDAGPSSRGGGRAARPRRFPTAAQPEVMRAAEKDDSYAAHVTEACRDAFRHLFGTRVAVAYQNEIKLLGQSLYYLLTTGSGQQTLGEEYCDISQVATSHGLPPTPARRMLFILYHTTVPYLAERISSRIVSRGIYMDDTQLDNHHESDNPSRGITESSTNTNESSRSLSFSMLSRLRSKAHAFWLWVVQKWPSMLPLGQDFIQLAIRTNLMFFYFEGLYYHLSKRGAGIHYVFIGKPMNQRPRYQILGIFLLIQLCILGAERLRRSNLSSIASSINQISSGSYPSSTGRSVPVVNEDGNIISDIRHGKAVDLASGSESSSSKSKCTLCLSTRQNPTATTCGHVFCWNCIMEWCNEKPECPLCRTPITHSSLICIYHSDF

SEQ ID NO: 1320 - protein, 238 aa, Oryza sativa
ENTMNRQVTFFKRRNGLLKKAHEISVLCDADVALIVFSTKGKLYEFSSHSSMEGILERYQRYSFDERAVLEPNTEDQENWGDEYGILKSKLDALQKSQRQLLGEQLDTLTTKELQQLEHQLEYSLKHIRSKKNQLLFESISELQKKEKSLKNQNNVLQKLMETEKEKNNAIINTNREEQNGATPSTSSPTPVTAPDPIPTTNNSQSQPRGSGESEAQPSPAQAGNSKLPPWMLRTSHT

SEQ ID NO: 1321 - protein, 242 aa, Panax ginseng
MSFYDDQSGNLSPQRKLGRGKIEIKRIENTTNRQVTFCKRRNGLLKKAYELSVLCDAEVALIVFSTRGRLYEYANNSVKGTIERYKKACTDSPNTSSVSEANAQFYQQEASKLRQEISSIQKNNRNMMGESLGSLTVRDLKGLETKLEKGISRIRSKKNELLFAEIEYMQKKEIDLHNNNQYLRAKIAENERAQQHMNLMPGSSDYELAPPQSFDGRNYIQLNGLQPNNHYSRQDQTALQLV

SEQ ID NO: 1322 - protein, 806 aa, Oryza sativa (japonica cultivar-group)
MVEMIRPTGPEPRTMPVKSPSNDPPTKPFLSVMYGRMPKKSNNTKYYEVLGVSKTATQDELKKAYRKAAIKNHPDKGGDPEKFKELAQAYEVLNDPEKREIYDQYGEDALKEGMGGGSSSDFHSPFDLFEQIFQNRGGFGGRGHRQKRGEDVVHTMKVSLEDLYNGTTKKLSLSRNALCTKCKGKGSKSGAAATCHGCHGAGMRTITRQIGLGMIQQMNTVCPECRGSGEMISDKDKCPSCKGNKVVQQKKVLEVHVEKGMQHGQKIVFQGEADEAPDTVTGDIVFVLQLKDHPKFKRKFDDLFTEHTISLTEALCGFQFVLTHLDGRQLLIKSNPGEVIKPGQHKAINDEGMPQHGRPFMKGRLFVEFNVEFPEPGALTPGQCRSLEKILPPRPRNQLSDMELDQCEETTMHDVNIEEEMRRRQQHRRQEAYDEDDDEDAGAGPRHARNNSARLGLDVETDAPLVATGQLHLFKKILTSESSENLNRYVHHCRRLHCRSFGCTSRKQYWILQGREEAAMEAAAIHAPTTTTSSDSGSCVTNGTREKREISKHKQLKRKRSTSPAPPPGCGGGQGQEAAVETDADAGAAGEEESSSCGGAGAGEGERKRGDAGRHPSYRGVRRRSWGKWVSEIREPRKKSRIWLGTFPTAEMAARAHDVAALAIKGRAAHLNFPSLAHTLPRPASTSPSDIQAAAALAAAAAATDQCESSSSAVAAATATDAEAAESTSSAAASPCAATSSVEENALFDLPDLLLDLSDGLWCSPVWTTAPADQYDAGDDGDDAAAPLLWAEQCWMDAPAAPVQPD

SEQ ID NO: 1323 - protein, 306 aa, Zea mays
MEGNAAAGKRSRTETANGAAGGGKRSKDMESFQTGLSSKSKPCNKFFSTIGCPFGEGCRFLHFVPGGYPAVAKMLNLGSPAVSAPSRTHVDHAALTGASHSASSGKTRMCTKYNTTEGCRFGDKCHFAHSERELGKPAYMPYGEPPMGGRFGGRPEPVQPAAMGPPAGNFGASATAKISVDASLAGGIIGKGGVNTKQISRVTGVKLCIRDHESSPNLKNIELEGNFDQIKQAGEMVRDLIATISTSMLAKNSSAAVAPSGGRGGGLGGKSNYKTKLCENFVKGACTFGERCHFAHGENEQRRGAV

SEQ ID NO: 1324 - protein, 445 aa, Candida glabrata CBS 138
MSNKFHCDVCSSDCTHRVRISCAVCPEYDLCVPCFSQGLYNGNHRPFHDYRIIETNSYPILCPDWGADEELALIKGAQSLGLGNWHDIAEHIGSREKDEVRDHYIEYYINSPFYPIPDITKDIQVPQEEFLNERKTRIEKFRDRPLEPPKKPMASVPSCHEVQGFMPGRLEFETEFENEAEGPVKDMVFEPDDQPLDLELKFAILDIYSSRLTVRAEKKRLLFENKLMEYRKLQNIDKKRSKEAKDLYNKIKAFARVMTAQDFEEFSKDILEELQCRTRIHQLQEWRSKGLTTLEAGLKYERDKQSRISTLERLGNYGDASLGNLGSSQAGTPGVAGTRYRSTPGHRSNTDYSQNGTDSNGKKKGITISDIQHASDYGLLSPEEQQLCIQLKILPKPYLAIKEVMFRELLKTGGSMPKKNCRDLLNIDPVKANRIYDFFQLQHWI

SEQ ID NO: 1325 - protein, 234 aa, Arabidopsis thaliana
MVSPENANWICDLIDADYGSFTIQGPGFSWPVQQPIGVSSNSSAGVDGSAGNSEASKEPGSKKRGRCESSSATSSKACREKQRRDRLNDKFMELGAILEPGNPPKTDKAAILVDAVRMVTQLRGEAQKLKDSNSSLQDKIKELKTEKNELRDEKQRLKTEKEKLEQQLKAMNAPQPSFFPAPPMMPTAFASAQGQAPGNKMVPIISYPGVAMWQFMPPASVDTSQDHVLRPPVA

SEQ ID NO: 1326 - protein, 275 aa, Arabidopsis thaliana
MSGEGNLGKDHEEENEAPLPGFRFHPTDEELLGYYLRRKVENKTIKLELIKQIDIYKYDPWDLPRVSSVGEKEWYFFCMRGRKYRNSVRPNRVTGSGFWKATGIDKPVYSNLDCVGLKKSLVYYLGSAGKGTKTDWMMHEFRLPSTTKTDSPAQQAEVWTLCRIFKRVTSQRNPTILPPNRKPVITLTDTCSKTSSLDSDHTSHRTVDSMSHEPPLPQPQNPYWNQHIVGFNQPTYTGNDNNLLMSFWNGNGGDFIGDSASWDELRSVIDGNTKP

SEQ ID NO: 1327 - protein, 95 aa, Fagopyrum sp. C97106
GRLYEYANHSVKATIDRYKKACSDSAGVTSVAEANAQYYQQEAAKLRNQIRTLQNNSRNLSRHMMGEGLSSLSMKDLKNLEARLEKGISRIRAKK

SEQ ID NO: 1328 - protein, 242 aa, Oryza sativa (japonica cultivar-group)
MENFPILFATQPTSSSTSSSYHFMSSSSGSHDHRHHHGLQAGGNGGGGGGSLSHGLFMGSSSSSIRMEELSNSKQAGDVVVDGGATRSPHGGDGDGAAGDDGGDAQAAAAGGRKKGEKKERRPRFAFQTRSQVDILDDGYRWRKYGQKAVKNNKFPRSYYRCTHQGCNVKKQVQRLSRDETVVVTTYEGTHTHPIEKSNDNFEHILTQMHIYSGLTPSSAAHASSSSPLFPSAAAAASHMFQ

SEQ ID NO: 1329 - protein, 242 aa, Arabidopsis thaliana
MGRGRVQLKRIENKINRQVTFSKRRSGLLKKAHEISVLCDAEVALIVFSSKGKLFEYSTDSCMERILERYDRYLYSDKQLVGRDVSQSENWVLEHAKLKARVEVLEKNKRNFMGEDLDSLSLKELQSLEHQLDAAIKSIRSRKNQAMFESISALQKKDKALQDHNNSLLKKIKEREKKTGQQEGQLVQCSNSSSVLLPQYCVTSSRDGFVERVGGENGGASSLTEPNSLLPAWMLRPTTTNE

SEQ ID NO: 1330 - protein, 176 aa, Candida albicans SC5314
MGRYSVKRYKTKRRTRDLDLIYNDLSSPESINKLKNQPLDELKPGLGQYYCIQCAKYFENQISLDRHTKSKIHKRRVKSLNERPYTPLEAEAAAGVNMEKFIASVEKYKQLENDKQENKHEYDKLINQKKDNLDAIITGIPSEEFQQQQQQQQQEELQDANQRTVSNDQEEVMMID

SEQ ID NO: 1331 - protein, 344 aa, Cryptococcus neoformans var. neoformans B-3501A
MDAPVASSSSHHPQAPLPAPYADLSFEPASQAQILRSHQRDTAQIHRLTELASEITRSLAGTRWLAQKQMIIDLLVKAIYLSLTLGRGSQTLGEEYTDILPYSPGRKPPPSKTRRFFTIMFLLFPTILVSPASTSYIRTGGLSQLSSRWRIAREKLGDFLSSPLGRAIPELHMIAFLFRGRFFELARRLTGMSYISALPPSPPEQRPASYEPLGLLLLIPFIRRLLLPLLSSQAELPESANHETWIADTIHDGKPTERASIVGANTFYDSPNTYLTQEALELPERQCTLCLEPRGTGEGSGGTVAVTECGHVFCWGCLGGLEKLECPLCRQSLRMERLIAAYNL

SEQ ID NO: 1332 - protein, 542 aa, Arabidopsis thaliana
MSSSDRDIIDIESGEEDLYSDGGNDIIDIESGEEDLYSDGGNVSDDYNPVDDTISRSEKSYVVVKEEDILKLQRDDIEQVSTVLSVSQVESIVLLLHYHWCVSKLEDEWFTDEERIRKTVGILKEPVVDVNGTEVDIQCGICFESYTRKEIARVSCGHPYCKTCWTGYITTKIEDGPGCLRVKCPEPSCYAVVGQDMIDEVTEKKDKDKYYRYFLRSYVEDGKKMKWCPSPGCEYAVEFGVNGSSSYDVSCLCSYKFCWNCCEDAHSPVDCETVSKWLLKNKDESENMNWILAKTKPCPKCKRPIEKNTGCNHMSCSAPCRHYFCWACLQPLSDHKACNAFKADNEDETKRKRAKDAIDRYTHFYERWAFNQSSRLKAMSDLEKWQSVELKQLSDIQSTPETQLSFTVDAWLQIIECRRVLKWTYAYGYYILSQERNKRVFARTFSLSCCSAEAENGLERLHHCAEEELKQFIGKIEDPSKNFGELRAKLIDLTKATKTYFENLVKALENGLVDVAYNESQSIEEPESFTKRSKTRKIKTLI

SEQ ID NO: 1333 - protein, 153 aa, Chorispora bungeana
MNSVSAFSEMFGSDYEPQGGDYCPTLATSCPKEPAGRKKFRETRHPIYRGVRQRNSGKWVSEVREPNKKTRIWLGTFRTAEMAARAHDVAALALRGRSACLNFADSAWRLRIPESTCAKDIQKAAAEAALAFQDETCDTTTTNHGLDMEGRCG

SEQ ID NO: 1334 - protein, 310 aa, Arabidopsis thaliana
MASNNPHDNLSDQTPSDDFFEQILGLPNFSASSAAGLSGVDGGLGGGAPPMMLQLGSGEEGSHMGGLGGSGPTGFHNQMFPLGLSLDQGKGPGFLRPEGGHGSGKRFSDDVVDNRCSSMKPVFHGQPMQQPPPSAPHQPTSIRPRVRARRGQATDPHSIAERLRRERIAERIRALQELVPTVNKTDRAAMIDEIVDYVKFLRLQVKVLSMSRLGGAGAVAPLVTDMPLSSSVEDETGEGGRTPQPAWEKWSNDGTERQVAKLMEENVGAAMQLLQSKALCMMPISLAMAIYHSQPPDTSSVVKPENNPPQ

SEQ ID NO: 1335 - protein, 153 aa, Chorispora bungeana
MTSVSTFSEMLGSEYESPTLSGEYCPALAASCPKKPAGRKKFRETRHPIYRGIRLRNSSKWVCEVREPNKKSRIWLGTFLTAEIAARAHDVAAIALRGKSACLNFADSAWRLRIPETTCPKDIQKAAAEAAVAFQAEINDTTTDHGLDRGDVG

SEQ ID NO: 1336 - protein, 154 aa, Chorispora bungeana
MTSFSAFSEMLGSEYESPTLSGEYCPALAASCPKKPAGRKKFRETRHPIYRGVRLRNSGKWVCEVRGPNKKSRIWLGTFLTAEIAARAHDVAAIALRGKSACLNFADSAWRLRIPETTCPKDIQKAAAEAAVAFQAEINDTTTDHGLDMERRWW

SEQ ID NO: 1337 - protein, 526 aa, Picea glauca
MGRHSCCYKQKLRKGLWSPEEDEKLVRHITKYGHGCWSAVPKQAGLQRCGKSCRLRWINYLRPDLKRGTFSPQEENLIIELHAVLGNRWSQIATHLPGRTDNEIKNLWNSCIKKKLRQRGIDPSTHRPLSEVNAEAGDSKNDNSNKKIETQAVMDESHVSAGNEFKHPNAIPRAETANPKFFHVPVEDNNLIASDSQAMLHNGFINSNSTTITATSTASAANISLPKEFFLERFNSVNATPTSVEPGFNFINQTSCTQGFTAERDHKLIDNPVLWVLQAPSRSVGFPTENLMPWPGQVPAKAVSDAFSDFSSDVCDYNSIMANPSMYRPGPCLSSLLYSERSLDQDLLDNAGTNCMNGSAVGSAQYWDNTENNNVRTSSRSSSCNSSTANLEVNNGAAFGHFWGFGERLDATDITSENERKAPLFLERAETEYAVKWSEMLPPFSSHTQEETLPMYITTDSKSQDLVSSDNINNHNQGALNSAIFPISWQQLQNTEYPVLGDRTTMLSTPLSDPDFHRIAAVLDQI

SEQ ID NO: 1338 - protein, 111 aa, Glycine max
MDTRKRGRPEPGFSLNGGFKKSKQEMESLSTGVGSKSKPCTKFFSTAGCPFGEGCHFLHYVPGGYNAVAHMMNLTPAAPPASRNVAALPPVPNGSAPPAVKTRICNKFNTA

SEQ ID NO: 1339 - protein, 175 aa, Chorispora bungeana
KKFRETRHPIYRGVRLRNSGKWVCEVREPNKKSRIWLGTFLTAEIAARAHDVAAIALRGKSACLNFADSAWRLRIPETTCPKDIQKAAAEAAVAFQAEINDTTKGHGLDVEETIVEAIFTEENSDGSYMDEEESMFGVPTLLASMAEGVLLPPPSVQFEYNYDFDGDTDVSLWSY

SEQ ID NO: 1340 - protein, 181 aa, Brassica napus
  misc_feature (93)..(93): Xaa can be any naturally occurring amino acid
  misc_feature (116)..(116): Xaa can be any naturally occurring amino acid
MSSRSERVVTRSSRRSNNVNGTQQSEQPRAGQQPPIVSGPPTIDVDAIEDDDDVVESTASAFDRAKRHKSGGSQRGPLVVDVESGGTTRLSKXRTKRQSDQANVDHNNPRKSKTVXPPVEEPKFNCPICMCPFTEEVSTKCGHIFCKKCIKLAVSVQAKCPTCRKRVIAKDLIRVFLPTTR

SEQ ID NO: 1341 - protein, 662 aa, Triticum aestivum
  misc_feature (225)..(225): Xaa can be any naturally occurring amino acid
MILLTGIPGISSTHASTQLHRSRLAHLPHRLLPPPRPAHLAGTLPPTPSRPCPIRRSSDLASAMDSDSEMPVASDEEMVDDEDYYYYSDEGEGDDGDASGGGASGDEDVSAGDYEGREAEGSDEAVSTREQRYIVLSEKDISERQEEDISEVSALLLIPREEASVLLHHYKWDISKVNDEWFSDEDKVRGIVGLLMNGTDIHNSRKLTCGICFEGYSSDMMSSAXAWAHFYCHECWEGYISAAVSQGPGCLSLRCPDPSCSAIVLQGMINKLGKHEDKEKYARFALRAYVESRKKTKWCPAPDCTCAVEFVSDVNYDVSCNCTFRFCWNCTEEAHRPVNCETVSKWILKNSAESENMNWILANSKPCPKCQRPIEKNQGCMHMTCTPPCKFEFCWLCLGSWVEHGERTGGFYACNRYESAKKEGVYDEAEARRERAKHSLERYMHYYERWASNQTSRQKAISDLQKAEKEQLAKLTDIYGIPETQLKFIIEAWSQIIECRRVLQWTYAYGYYLEDKVKSGFFEYLQGEAESGLERLHQCAEKDLLAFLPFSKHDTTEDHPSPAEFGEFRVKLAGLTSITRNYFENLVRALEDGLEDVQCAGEAATSSKATNSKKGGAKGKAAKKQPSRSSSDHSDDTWPCERCTFLNPSSADACTACDKQRY

SEQ ID NO: 1342 - protein, 228 aa, Dendrobium crumenatum
MGRGKIEIKKIENPTNRQVTYSKRRVGILKKAKELTVLCDAQVSLIMFSSTGKLADYCSPSTDIKGVYERYQVVTGIDLWNAQYERMQNTLKHLNEINQNLRKEIRQRKGEELEGMEIKELRGLEQTLEESLRIVRQRKYHVIATQTDTYKRKLKSTRETYRALVNELEMKDDNPNYAFSAENHSRVYENSIPMVNNDCPQMFSFRVVQPIQPNFLGIGYESHDLSLA

SEQ ID NO: 1343 - protein, 224 aa, Oryza sativa
MGRGKIEIKRIENATNRQVTYSKRRTGIMKKARELTVLCDAQVAIIMFSSTGKYHEFCSPSTDIKGIFDRYQQAIGTSLWIEQYENMQRTLSHLKDINRNLRTEIRQRMGEDLDGLEFDELRGLEQNVDAALKEVRHRKYHVISTQTETYKKKVKHSYEAYKTLQQELGLCEEPAFGFVDNTGGGWDGGAGAGAAADMFAFRVVPSQPNLHGMAYGGNHDLRLG

SEQ ID NO: 1344 - protein, 222 aa, Dendrobium crumenatum
MGRGKIEIKKIEYPTNRQVTYSKRRAGIMKKANELTVLCDAQLSLVMFSSTGKFSEYCSPSTDTKSIYDRYQQLSGINLWSAQYEKMQNTLNHLKEINHNLRREIRQRMGEDLDGLEIKELRGLEQNMDEALKLVRNRKYHVISTQTDTYKKKLKNSQETHRNLLRELETEHAVYYVDDDPSNYDGALALGNGASYLYSYRTQPSQPNLQGMGYGPHDLRLA

SEQ ID NO: 1345 - protein, 243 aa, Brassica napus
MEGIQNPVVSRSVEEVFGDFRGRRAGLLKALSTDVRKFYHECDPDKENLCLYGLPNETWEVNLPVDEVPPELPEPALGINFARDGMPEKDWISLVAVHSDSWLISVAFYFGARFGFGKNERKRLFQMINDLPTIFEVITGNAKQTKDQSANNHNSSRTKPSGVKASKTSPPPREDDDSGEDEEDDEQGAVCGACGDNHDDFWICCDACEKWFHGKCVKITPAKAEHIKHYNCPTCSTNKKMRA

SEQ ID NO: 1346 - protein, 483 aa, Arabidopsis thaliana
MGRSRGNFQNFEDPTQRTRKKKNAANVENFESTSLVPGAEGGGKYNCDYCQKDITGKIRIKCAVCPDFDLCIECMSVGAEITPHKCDHPYRVMGNLTFPLICPDWSADDEMLLLEGLEIYGLGNWAEVAEHVGTKSKEQCLEHYRNIYLNSPFFPLPDMSHVAGKNRKELQAMAKGRIDDKKAEQNMKEEYPFSPPKVKVEDTQKDRSFGGKKPVSTSVNNSLVELSNYNQKREEFDPEYDNDAEQLLAEMEFKENDTPEEHELKLRVLRIYSKRLDERKRRKEFIIERNLLYPNPFEKDLSQEEKVQCRRLDVFMRFHSKEEHDELLRNVVSEYRMVKRLKDLKEAQVAGCRSTAEAERYLGRKRKRENEEGMNRGKESGQFGQIAGEMGSRPPVQASSSYVNDLDLIGFTESQLLSESEKRLCSEVKLVPPVYLQMQQVMSHEIFKGNVTKKSDAYSLFKIDPTKVDRVYDMLVKKGIAQL

SEQ ID NO: 1347 - protein, 423 aa, Oryza sativa (japonica cultivar-group)
NQTPCGRDLAALAMPPPLSFLHLAANPTPLHASPLRRARLRHRLSLRTDHPSRRAVASASASAGENPSTPGGPIADVEMVRGKDGVWTARPPTVVVLWDLDNKPPRGPPFPAATALRDAASLLGRVVSVSAFANRHAFSHVPAWVADERRERRAMDRAERAGAASPPVPYSCAVCGRRFPTRPDLTRHFRQLHQRERNKKLSRLRSLKGKKRQKFRERFISGNTKYDDAARELLTPKVGYGLAAELRRAGVHVRTVSDKPQAADHALKRQVKHSVACGVDWLVLVSDDSDFTDTVRKARAADLRTVVVGDGCRALGSVADIWLPWDRVENGEVDEDMLRNGTHMGFRDEEEDEQDDDEFIVDWDTSDLDGVVDDIVATRTKLFGATTMSAFADEEIMDGILGVGINGGDMLWSSDDEDEDGYF

SEQ ID NO: 1348 - protein, 486 aa, Arabidopsis thaliana
MGRSRGNFQNFEDPTQRTRKKKNAANVENFESTSLVPGAEGGGKYNCDYCQKDITGKIRIKCAVCPDFDLCIECMSVGAEITPHKCDHPYRVMGNLTFPLICPDWSADDEMLLLEGLEIYGLGNWAEVAEHVGTKSKEQCLEHYRNIYLNSPFFPLPDMSHVAGKNRKELQAMAKGRIDDKKEQNMKEEYPFSPPKVKVEDTQKESFVDRSFGGKKPVSTSVNNSLVELSNYNQKREEFDPEYDNDAEQLLAEMEFKENDTPEEHELKLRVLRIYSKRLDERKRRKEFIIERNLLYPNPFEKDLSQEEKVQCRRLDVFMRFHSKEEHDELLRNVVSEYRMVKRLKDLKEAQVAGCRSTAEAERYLGRKRKRENEEGMNRGKESGQFGQIAGEMGSRPPVQASSSYVNDLDLIGFTESQLLSESEKRLCSEVKLVPPVYLQMQQVMSHEIFKGNVTKKSDAYSLFKIDPTKVDRVYDMLVKKGIAQL

SEQ ID NO: 1349 - protein, 223 aa, Dendrobium crumenatum
MGRGKIEIKRIENTTNRQVTFCKRRNGLLKKAYELSVLCDAEVALIVFSSRGRLYEYSNSSTNSTIERYKKAITNSSNSVVEVNSQQYYQQEAAKLRHQIQILHNTNRHPMGEGLTSLSIKELKQLESRLERGITRIRSKKHEMLFAEIEFMQKREEDLQNENMYLRAKITENERQTNIDTTASALDTLSTFDSRNYYPVNMLEAAAHYHNQDQTALHLGYDN

SEQ ID NO: 1350 - protein, 246 aa, Oryza sativa
MGRGKVQLKRIENKINRQVTFSKRRSKLLKKANEISVLCDAEVALIIFSTKGKLYEYATDSCMDKILERYERYSYAEKVLISAESDTQGNWCHEYRKLKAKVETIQKCQKHLMGEDLESLNLKELQQLEQQLENSLKHIRSRKSQLMLESINELQRKEKSLQEENKVLQKELVEKQKVQKQQVQWDQTQPQTSSSSSSFMMREALPTTNISNYPAAAGERIEDVAAGQPQHERIGLPPWMLSHING

SEQ ID NO: 1351 - protein, 429 aa, Oryza sativa (indica cultivar-group)
MPSYAHHHSSLGDDEEENGRFLSLCLLGFWNFGNLWFLLCVYVGAFWTEKDGKMDALKSSCRSEEAADEGAAAAPSAWGMVERDGFSVEDLLDLEEFCEAEKDAAEENEQALALVAAPEEEKSKDDSQPSSVVTYELVAPPPPPPEIVDLPAHDVEELEWVSRIMDDSLSELPPPPQPPASVVASLAARPPQPRQLQRRPQDGAYRALPPASYPVRTPTICALSTEALVPVKAKRSKRSRATAWSLSGAPPFSDSTSSSSTTTTSSCSSSASFSSFSPLLKFEWHPLGGTSDLPDDHLLPPGKKSKHGKNGKNKPKKRGRKPKQLPPHPSGAAASAPAPGDRRCSHCGVQKTPQWRAGPEGAKTLCNACGVRYKSGRLLPEYRPACSPTFVSAIHSNSHRKVLEMRRKKEVGSGLLTAAAAAAPAVASF

SEQ ID NO: 1352 - protein, 267 aa, Oryza sativa
MGRGKVQLKRIENKINRQVTFSKRRNGLLKKAHEISVLCDAEVAAIVFSPKGKLYEYATDSRMDKILERYERYSYAEKALISAESESEGNWCHEYRKLKAKIETIQKCHKHLMGEDHESLNLKELQQLEQQLESSLKHIISRKSHLMLESISELQKKERSLQEENKALQKELVERQKNVRGQQQVGQWDQTQVQAQAQAQPQAQTSSSSSSMLRDQQALLPPQNICYPPVMMGERNDAAAAAAVAAQGQVQLRIGGLPPWMLSHLNA

SEQ ID NO: 1353 - protein, 168 aa, Arabidopsis thaliana
MEVTNGLNLKDTELRLGLPGAQEEQQLELSCVRSNNKRKNNDSTEESAPPPTKTQIVGWPPVRSNRKNNNNKNVSYVKVSMDGAPYLRKIDLKMYKNYPELLKALENMFKFTVGEYSEREGYKGSGFVPTYEDKDGDWMLVGDVPWDMFSSSCQKLRIMKGSEAPTAL

SEQ ID NO: 1354 - protein, 416 aa, Picea glauca
MGVPKDEAAVTMAVAERIKGPWSPEEDATLHRLVEKYGPRNWSQISRGIPGRSGKSCRLRWCNQLSPQVEHRPFSPHEDATIIQAHARHGNKWATIARLLPGRTDNAIKNHWNSTLRRRYHGEKDHSNGLVVNLESAAEDKEAMISLTAPAMVPALVFAAAADSSRKRSNSSCSANDNPGDAEVESRRLKRLNFSESPTSSDNNNNNNEEDTISGHCNSVAPGSSPVQQLHRPVPRQSAFNCYEAVKMHEEASASVSASGSAGAFDPPTSLSLSLPGSGSFSENNSSGECSPIEQSFETKSAKFQAYQQQTGYSFADPFPVSGYLKTEEAMAMMSTAVKIAIGQALPLIFQLSSGNSHGGCSGDSSNFGGSLLSIMREMIAKEVQNYTNGSQCSNQGPGLNSVAPVFREVGLMLKK

SEQ ID NO: 1355 - protein, 373 aa, Picea glauca
MALSNGRSLEDLDRIKGPWSPEEDASLQRLVQKYGPRNWTQISKGIQGRSGKSCRLRWCNQLSPQVEHRPFTPSEDAAILQAHAQHGNKWATIARSLPGRTDNAIKNHWNSTLRRRCRDSDKGILVHLDDEISSLDAARKRSSDGFSHDGSSALEDNCCSSWEVDSKRLKRLGELGAEQGPDVEVELEVSDRSDSNPGRVLYRPVPVASFFGSFGKTVANLQETASGSVGVDPPTSLSLSPPGLDPAIHSPKPPSQKDFHNNSTDNNKIPTPPVVGYMRADEAVERLSTAVKATVASMLTPVLSSSPRGFNPPAVSSDVLALMRDMVAKEVHKYMSSHQPPGMYTPLSPHPEFLGAAGLVRNVVLGGALHLNK

SEQ ID NO: 1356 - protein, 201 aa, Oryza sativa (indica cultivar-group)
MVRGKVQMRRIENPVHRQVTFCKRRGGLLKKARELSVLCDADVGVIIFSSQGKLHELATNGNMHNLVERYQSNVAGGQMEPGALQRQVAEQGIFLLREEIDLLQRGLRSTYGGGAGEMTLDKLHALEKGLELWIYQIRTTKMQMMQQEIQFLRNKEGILKEANEMLQEKVKEQQKLYMSLLDLHSQQPTQPMTYGNRFFSI

SEQ ID NO: 1357 - protein, 350 aa, Picea glauca
MKGKSSGHDEPDRIKGPWSPEEDAALQHFVQKCWPRNWSLISKAIPGRSGKSCRLRWCNQLSPQVEHRPFTPEEDATIIRAHAQHGNKWATIARMLSGRTDNAIKNHWNSTLRRRCQGGGALVIDDEITSGADGFRKRSLSEDADASRKLKKLSLGTTATTTTTEPCSSSASDRSDSSLALGSPPVYRPVPRAAPLSLTNEANLNPSHHEASCSSTDPPTSLCLSLPGTDAPARPTVALSALPLPGSSSPLAPPGYIKAEEAMEWMNSAINTTLTQVLSPFVAPARSHGIMPETLGSSGLLAVMQEMVAKEVRDYMSSMQHRNNNNTEFRGCVASPPPMGMRVSNSNALG

SEQ ID NO: 1358 - protein, 257 aa, Zea mays
MAIDDESPIRVNSRGGGAMGGGECDGAENQRWPPWLKPLLGTSFFGQCKLHADAHKSECNMYCLACMNGALCSQCLAYHRDHHAIQIRRSSYHDVIRVSEIQKVLDISGVQTYIINSARVVFLNERPQQRPGKGVTNTCEVCQRSLLDTFRFCSLGCKIVGTSGDLRIRKKQAVVKKHQKKKKQHAQQQQQQHRGAALDSEDDSSSTSTSRGSDRSSVVQSFTPSTPPATANSFRTGKRRKGVPHRSPFGSLMVEEF

SEQ ID NO: 1359 - protein, 207 aa, Arabidopsis thaliana
MVRGKIEIKKIENVTSRQVTFSKRRSGLFKKAHELSVLCDAQVAAIVFSQSGRLHEYSSSQMEKIIDRYGKFSNAFYVAERPQVERYLQELKMEIDRMVKKIDLLEVHHRKLLGQGLDSCSVTELQEIDTQIEKSLRIVRSRKAELYADQLKKLKEKERELLNERKRLLEEVNMHHSSKGNTEGGHRTKHSSEVETDLFIGLPVTRL

SEQ ID NO: 1360 - protein, 230 aa, Triticum aestivum
MVRGKTQMKRIENATSRQVTFSKRRNGLLKKAFELSVLCDAEVALVVFSPRGRLYEFASATSLQKSIDRYKAYTKDTVNNKTVQPDIQQVKADALSLAKKLEALEDSKRKILGENLGGCSTEELHFLEGKIEKSLRVIRGKKTQLLEQQIAKLKEKERTLLKDNEDLRGKQRNLEARLLLPAPNSVAPLQPRGEPAPEQEPVQRDEDVETELYIGLPGVRCSSRRSGQAK

SEQ ID NO: 1361 - protein, 250 aa, Cynodon dactylon
MERVEVLGGGSSAGQVRKKRMRRKSTGPDSIAETIKRWKEHNQKIHEDRKAPAKGSKKGCMAGKGGPENGNCAYRGVRQRTWGKWVAEIREPNRGRRLWLGSFPTALEAAHAYDEAARAMYGPTARVNFSESSADANSGCTSALSLLASNIPPASQRSDDKDEVESVETEVHEVKMEVNDDMRSVHVERKTLEVFQSEESVLRKEGDVSYDYFHVEDVLEMIIVELNAAKKIEVHEEYQDGDDGFSLFSY

SEQ ID NO: 1362 - protein, 243 aa, Dendrobium crumenatum
MGRGRVELKRIENKINRQVTFAKRRNGLLKKAYELSILCDAEVALIIFSNRGKLYEFCSSSSMLKTLERYQKCNYEGPETNIISRETQSSQQEYLKLKARVEALQRSQRNLLGEDLGPLSSKELEHLERQLDASLKQIRSTRTQFMLDQLADLQRREQMLCEANKALKRRFEESNQTAHQQVWDPSTTHAVGYGRQPAQHHGDAFYHPLECEPTLQIGYHSDITMAPTTAPNVSNYMPPGWLV

SEQ ID NO: 1363 - protein, 553 aa, Hordeum vulgare subsp. vulgare
MYRVKSESDCEMMHQEDQMDSPVGDDGSSGGGSPHRGGGPPLKKGPWTSAEDAILVDYVKKHGEGNWNAVQKNTGLFRCGKSCRLRWANHLRPNLKKGAFTPEEERLIIQLHSKMGNKWARMAAHLPGRTDNEIKNYWNTRIKRCQRAGLPIYPASVCNQSSNEDQQGSSDFNCGENLSSDLLNGNGLYLPDFTCDNFIANSEALSYAPQLSAVSISSLLGQSFASKNCGFMDQVNQAGMLKQSDPLLPGLSDTINGALSSVDQFSNDSEKLKQALGFDYLHEANSSSKIIAPFGGALTGSHAFLNGTFSTSRTINGPLKMELPSLQDTESDPNSWLKYTVAPAMQPTELVDPYMQSPTATPSVKSECASPRNSGLLEELLHEAQGLRSGKNKQLSVRSSSSSVSTPCDTTVVSPEFDLCQEYWEERLNEYAPFSGNSLTGSTAPMSAASPDVFQLSKISPAQSPSLGSGEQAMEPAYEPGAGDTSSHPENLRPDAFFSGNTADSSVFNNAIAMLLGNDMNTECKPVFGDGIMFDTSVWSNLPHACQMSEEFK

SEQ ID NO: 1364 - protein, 221 aa, Glycine max
MEGQRSQRWGYLKDKAIATSLAEEEMENSMDGEEDDTGDEDKRKRVMERARGPNTERVPLRLCLVDRCTANLTEAKQYYRRHKVCEVHAKASSATVAGVKQRFCQQCSRFHELAEFDETKRKCRRRLAGHNERRRKISGDSYGEGSGRRAVSLTQTQERNRIDMKLPMTNSPFTRPTDQIKPTSKHPTDSLSSVIHLCSNIPASSSYPKNGPLRYLGSRKL

SEQ ID NO: 1365 - protein, 250 aa, Cynodon dactylon
MERVEVQGGASSAGQVRKKRMRRKSTGPDSIAETIKRWKEHNQKIHEDRKAPAKGSKKGCMAGKGGPENGNCAYRGVRQRTWGKWVAEIREPNRGNRLWLGSFPTALEAAHAYDEAARAMYGPTARVNFSESSADANSGCTSALSLLASNIPPASQRSDDKDEVESVETEVHEVKMEVNDDMRSVHVERKTLEVFQSEESVLRKEGDVSYDYFHVEDVLEMIIVELNAAKKIEVHEEYQDGDDGFSLFTY

SEQ ID NO: 1366 - protein, 368 aa, Oryza sativa (japonica cultivar-group)
MDPRFPPPAPSGGAPPRGHHRRAHSETFIRLPDADLLLDPDGEFGFSDLDFPSLSDDSPAASDPTPPPPPPALPQAAPRPPGGAHLRSLSLDAAFFDGLAFQGGGGGGGAGSGSSGGGAGHKRSGSMDGESSLFEGESAPPDYAKKAMPADRLAELALLDPKRAKRILANRQSAARSKERKIKYTGELERKVQTLQTEATTLSTQLTLLQAYWDAMIIKSVSLCLVVFILNCEYRYSSVLANCTFQDKQGHYKAIEIKESKYIYPDKQSNLLRKPSLFNAALNDALREEVQRLKIAAGQVPNMNGNSFNGGLQQQQQQQMPTYFSQQQQMHYLSGHQGRHHHPNNPHNSLNGGQSMSGQTLNDSMDFM

SEQ ID NO: 1367 - protein, 745 aa, Zea mays
MVKRNSEAHNVGSAICIGEAAVAENNRSKWNWDRSDGYRRCRFLRRGICVGIRKCRGRTGGPAAEQTRFLCGRSRTACKRPLHLPAHVSDSDLTDRMEAPELPAQPVDFEGENAEEKERTEEPASGFRLQADTSLASIAPPLAISEESSEVKSGSGGGDGIQTWVNEQTKCAQLPNLSFETHHSASNLLNDTDNSKIEPFKPCDEQYTDYTPCEEQSRAMTFPRDNMIYRERHCPPDKEKLYCLIPAPKGYVAPFRWPKSRDFVHYANVPHKSLTVEKAIQNWVHYEGNVFRFPGGGTQFPQGADKYIDQLASVIPIAEGKVRTALDTGCGVASLGAYLFKKNVLTISFAPRDNHEAQVQFALERGVPAYIGVLGSIKLPFPSRAFDMAHCSRCLIPWSGNDGMYMMEVDRVLRPGGYWVLSGPPIGWKIYYEGWQHSKEDLQNEQRKIEQFAQLLCWKKISEKDGIAIWRKRLNDKSCSMKQYNPKGVKCGLTSDSDVWYKKMEVCIDPLPNVNSVSKVAGGQLEPFPKRLYAVPPRITLGSVPGFSVQSYEEDNKLWQKYVEAYKNTNNLLDTGRYRNIMDMNAGLGSFAAALESPKLWVMNVVPTIANTSTLGVIYERGLIGMYHDWKWEEDKTEAANGDRGRCEGFSTYPRTYDLIHSNGIFSLYQNKCQFEDILLEMDRILRPEGAVIIRDKVDVLVKVEKIANAMRWKTRLADHEGGPLVPEKILFAVKQYWTVAKTSS

SEQ ID NO: 1368 - protein, 163 aa, Saccharomyces cerevisiae
MSSQKIDLTKLNPEQLNAVKQQFDQELQHFTQSLQALTMAKGKFTECIDDIKTVSQAGNEGQKLLVPASASLYIPGKIVDNKKFMVDIGTGYYVEKSAEAAIAFYQKKVDKLNKESVQIQDIIKEKTQYSLSIEAQIRQAAIRQHEAMSKQQQQQQKKESSTA

SEQ ID NO: 1369 - protein, 421 aa, Triticum aestivum
  misc_feature (220)..(220): Xaa can be any naturally occurring amino acid
  misc_feature (375)..(375): Xaa can be any naturally occurring amino acid
PRAVDNLFCRRCLVFDCKLHGCSQDLVFPTEKQPPWNSLDDGIPCGIHCYKLAPKPDATTTVDSDMLDIEEPTHSSDNTRNQLSSNKKKQGSSGKKAKSQQSEGSSTQRVASESSDSEGHPTSTKSPQQSSCQSKVKISPKGGIRKSTNRRIAERILMSVKKGHREVAPSDSNSGGCLWPTARPLRSDTRNGHKDSVASPQQNSPSTRSSRKKDAPQMGXNSLASGEDRNDSTEETKNEHSATDGHDSLMIEDVEDNICRQENKCRSWKVIEQGLLVKGLEIFGRNSCLIARNLLCGMKTCSDVFQYMSYIENSSASGTLSRGDSLVKGYIKGHELRVRSRFIRRRGRVRRLKYPWISAGYHFIRRRITERKDQXPCRQYNPCGCQSACGKQCPCPINGACCEKYCGGQSQQQLQGLAERN

SEQ ID NO: 1370 - protein, 283 aa, Physcomitrella patens
MGRGKIEIKKIENTTSRQVTFSKRRGGLLKKAHELAVLCDAEVALVIFSSTGKLFEYASSGSMRDIIERYKKSPNGAMKSGASTDFLGREVLKLQEQVERLKSSQRRMLGEDLSALKVPDLLQLEQQLDLGASRVRARKNQLILEEIEGLQKKEQELMVANEDLRKKIADAEAVARANLSEARPESPRHLARTLSRDVSASSHPAATVYPHPNLRDVQRSQTSLQLGMFSSESYPPSSSRWPSEQQFPSASEGCAGESSMKWDHPHYHIQNRLHANILPSVRI

SEQ ID NO: 1371 - protein, 312 aa, Physcomitrella patens
VFPPSSPASTAEASVPSGSTHSVLHPTAKVHHLLHSAQQGQQTQQGLPEHILRPLAAAYRPVLPPNPFNKLDVSYKGPSPGNSSLSSGPLESATTVSFSNISVDRKSQQTGKSSDHPSLLPPRPQASNSRKKCSGKSDENGATCAILGRCHCSKRRKLRLKRTIQVRAISSKLADIPPDDYSWRKYGQKPIKGSPHPRGYYKCSSIRGCPARKHVERSMEDPTMLIVTYEGNHLHRTQTTHNHRLRMEAFQCSHNRDKLAMLLTGQHTHTYTHTHSHKHSFHTHIGPVEVSLQVCTHFVLHFFISNFSLFFL

SEQ ID NO: 1372 - protein, 214 aa, Oryza sativa (indica cultivar-group)
MKIGCDACEQAEAAVLCCADEAALCRRCDAAVHSANRLAGKHTRVALLLPSSSSAAAGDDDHHPTCDICQEKTGYFFCLEDRALLCRSCDVAVHTATAHAAAHRRFLITGVRIGGSVDAAAAADVIVSPTSSSIAPAGSASSNHAVAGAGAAGNNNGRSPAPVRFSGGDGGVEPEQQWPWSDVFAADDDDDVSAAMEQCYYHGISEPHSSSLTG

SEQ ID NO: 1373 - protein, 222 aa, Glycine max
MGRGKIEIKRIENTTNRQVTFCKRRNGLLKKAYELSVLCDAEVSLIVFSSRGRLYEYSNNNIRSTIERYKKACSDHSSASTTTEINAQYYQQESAKLRQQIQMLQNSNRHLMGDALSTLTVKELKQLENRLERGITRIRSKKHEMLLAEIEYFQKREIELENENLCLRTKITDVERIQQVNMVSGPELNVIQALASRNFFNPNMLDGGTVYPQTDKKILHLG

SEQ ID NO: 1374 - protein, 66 aa, Glycine max
NRRLQNEVLELRALKLSPQFYMHMTPPITLTMCPSSERVAVSPSSARDLDTHDYYVPSSYPWAFPI

SEQ ID NO: 1375 - protein, 201 aa, Griffithsia japonica
GTRGSNKVSGVNATEVVKPEGGVESSRESRRQQRWLRKGMQQVKARHELVTGSMLQERRKAVFCRRSGIHGFGLYAQEEIEAREFVIEYVGVVIRQSVADVREREYEEGGVGDSYLFRLNGEMVVDATRRGGIARFINHSCDPNLTATTQRVGGTERIVFYSRRHIGKYDELTYDYKFALEGDDKKIRCLCKSLNCRKFLN

SEQ ID NO: 1376 - protein, 217 aa, Ophioglossum pedunculosum
RSGLLKKAYELSVLCDAEVALIIFSGTGKLFEFASSSMKKILERYRKYGGGLHDNSIATRDAEYWRNEVMRMKEHIACLEESQRHLLGENLVSLSVKNLQKLEHQLEIGANRIRTRKTQILLEQIQELQKKEHFLHGENNILKTKLEQLSTRQVPSLGTLIYTSTVTTTSTTSAGAGVEDNAGGHDSMNAMQKMTLHSNFQPATSAQNTLQLGYYPD

SEQ ID NO: 1377 - protein, 584 aa, Oryza sativa (japonica cultivar-group)
MAMVEQEGCVENRQPLAASSSSVSDGSSYGGGGGGLAQMSPPVSSSANSISGLRRTSGPIRRAKGGWTPEEDETLRKAVEAYKGRNWKKIAECFPYRTEVQCLHRWQKVLNPELIKGPWTQEEDDQIIDLVKKYGPTKWSVIAKALPGRIGKQCRERWHNHLNPEIRKDAWTTEEEQALINAHRIYGNKWAEIAKVLPGRTDNSIKNHWNSSLRKKQDMYNTSNNMVVPKLLVHDKFKDKPKLMAMEGHLDLNKAPIINSKDQPGTAHRSNCSGFLSRSSLPTAQPLTSREASVVDGSAVTLVAQALESDSVRGKGLEIDSVHEKGLEVNSAPDHTGNSWTIQLEAAPSKGEAELSLKNEARSLGPLCYQIPNMEDVVPVSSSLFSDHLTGNHTSEHCGDDILSPAGCTTPPPTKGKLTSQLSVDSILKSAANSFPGTPSILKRRKRDKSTPVSASEMKISGSNTDRFYTPMGMEPATATPESFKTTSFLSLGSLDGSVKSFDVSPQYRARSKRMALTKTVEKQLDFSSDGLDTCGSEILNSSCNNSQSTLSITEAPKLKEKEHAVQLENLTKNFAHTTNLDVT

SEQ ID NO: 1378 - protein, 215 aa, Hyacinthus orientalis
HVEFEYRGFVANSLADLEPYLLESAPNPRNGPDEIEAVAVNSIFELHRLLAREGAIDKVLSTVKAIKPKIMTVVEQEANHNGGLFAERFTEALHYYSTMFDSLEGGASADAVSGGQQNQVMSEVYLGRQICNVVACEGAERTERHETLVQWRNRLSPAGFEPVHLGSNAFKQASMLLALFAGGNGYRVEEKDGCLTLGWHTRPLIATSAWRVADA

SEQ ID NO: 1379 - protein, 357 aa, Zinnia elegans
MDTMNQSSCTVPPGFRFHPTDEELVGYYLRKKVASQKIDLDVIKDIDLYRIEPWDLIERCRIGYEEQNEWYFFSHKDKKYPTGTRTNRATMAGFWKATGRDKAVYEKLRLIGMRKTLVFYKGRAPNGQKTDWIMHEYRLESEENGPPQEEGWVVCRAFKKRATGQTRTTPAWESNYFLDESSLLTSTMDDYTTIQPSNIPLTSSFMCKQELEASENLNFIHCDQFIQLPHLESPSLQSIKRPISSILYEHDQQEDDQITKRITNNVRSKDEVRDWRDLDKFVASQLSQEEEIRCVEEGFSTNFQENIDHSTSLSHMFNYQDGIEEYSGCDKGGKLNGFLSSTSSDHFDVGICIFDKL

SEQ ID NO: 1380 - protein, 291 aa, Zea mays
MGCKACDKPKPNYRKGLWSPEEDQKLRDYILLHGHGCWSALPAKAGLQRNGKSCRLRWINYLRPGLKHGMFSPEEEETVMSLHATLGNKWSRIARHLPGRTDNEVKNYWNSYLKKRVEGKDQGPSTPAPAASNSDDDSHCVKQRRDDDGTADSGASEPRESSSADDSSCLTDPHACRPHAPVPPKVMFADWLDMDYVGGALPATAPAAPGLLGAAGVATASTGDRDQHQVMSMSQGSVQVDGPSGADVSLHGFDDSGAGCWEFQEHFDAIDHMQAAGFCDLLSMSDYFGLD

SEQ ID NO: 1381 - protein, 443 aa, Arabidopsis thaliana
MSSSDRDIIDIESGEEDLYSDGGNDIIDIESGEEDLYSDGGNVSDDYNPVDDTISRSEKSYVVVKEEDILKLQRDDIEQVSTVLSVSQVESIVLLLHYHWCVSKLEDEWFTDEERIRKTVGILKEPVVDVNGTEVDIQCGICFESYTRKEIARVSCGHPYCKTCWTGYITTKIEDGPGCLRVKCPEPSCYAVVGQDMIDEVTEKKDKDKYYRYFLRSYVEDGKKMKWCPSPGCEYAVEFGVNGSSSYDVSCLCSYKFCWNCCEDAHSPVDCETVSKWLLKNKDESENMNWILAKTKPCPKCKRPIEKNTGCNHMSCSAPCRHYFCWACLQPLSDHKACNAFKADNEDETKRKRAKDAIDRYTHFYERWAFNQSSRLKAMSDLEKWQSVELKQLSDIQSTPETQLSFTVDAWLQIIECRRVLKWTYAYGYYILSQERNKRVFAS

SEQ ID NO: 1382 - protein, 205 aa, Juglans regia
KRRNGLLKKAYELSVLCDAEVALIVFSSRGRLYEYANNSVKSTIDRYKKARADSSNTGSVSEANTQFYQREAATLRQQINSVQESNRKMLGESLSGMAFRDLKSLESKLESGIRRIRSKKNELLFAEIEYMQKREVDLHNNNQLLRAKIAENERNQQNLNVMPGGGNLELMHSQPFDSRNYFQVDALQPNHDQYPRQDQMALQLV

SEQ ID NO: 1383 - protein, 172 aa, Brassica napus
MAYEKVNELNLKDTELRLGLPGTGQVKEEQEVSCVRSNKRQHQSDNEEESTPPTKTQIVGWPPVRSYRKNNNSVVSYVKVSMDGAPYLRKIDLKTYKNYSELLKELENMFKFTIGEYSEREGYKGSGVVPTYEDKDGDWMLVGDVPWDMFSSSCKRLRIMKGSDALALDSAL

SEQ ID NO: 1384 - protein, 687 aa, Capsicum annuum
MCSGSGSRVCSADLAMEAKIQDQKELVPNFSLLLELSASDDIRNFQKAVEEEGHDINEVGLWYVRKVGVKKMGYEERTPLMVAATFGSKQVLNYILEKGCVDVNQTCGSDRATALHCAIVGGSSALPEVVKLLLDASADANLVDADGKRAVDLISSRGRCLNSRRKILEHLLGGNSGDEGEGSGCIDQIISEQAEEQLLLTPTVSKFGSEKKEYPVDPSLPDIKNGIYGTDDFRMYIFKVKPCSRAYSHDWTECPFVPPGENARRRDPSKYHYSCVPCPDFRKGTCQRADACEYAHGIFECWLHPAQYRTRMCKDETNCNRRVCFFAHKPGELRPLYPSTGSAVLSPRSYSNGTTSLDISSITPLALGSPSVMMPPTSTPPMSPAGASSVGGSLWPGQSSHSTPTLQLPISRLKTSINARHMELGNGYLRQDQLMDDLSALSSPSRWNGSSAKAATFATSFNDLNGELGRHGGLEPTNLDDILATLDSKILSQLQGLSLDAVSPHLQSPKGMQMRQNMNQQHMTSYSSGQSSPSFRTSSSYGIDASIAAATAASSSRSAAFAKRSQSFIDRSAVGRLSNASAMPSNLSGWGSPDGKLDWGIQKDELNKLRKSASFGLRNSGNRFPTNEGSVSDSSVESDVSWVQPLDSPARQLAMEDQQYRLNASRGSEATPTWVDQLYMEQEQIVH

SEQ ID NO: 1385 - protein, 215 aa, Juglans regia
IENETNRQVTYSKRRKGLFKKAHELTVLCDAKVSLIMISSNKKLRDYVSPSTTTKQIFDQYQHTMGVDLWSSHYERMQEELKKLNDVNRSLRREIRHRRGESLIDLNLEELYHLEQNVESAVKVIRDRKYHVIGKKTDILKKKKKRAESIHKVLLHELVARDEDPYGLVDNGGGDYCDPDIIGCSNTDSCMFALRLQPNFHMGEGSDLTTYTLLE

SEQ ID NO: 1386 - protein, 322 aa, Zea mays
MKVLCSACEAAEASVLCCADDAALCARCDREVHAANRLAGKHQRLPLLAPGGQGAAAVSPPKCDICQECDAYFFCLEDRALLCRSCDVAVHTANSFVSAHRRFLLTGVQVGQELEPDDLSLEQREASSPPPAKSEPTPPLYSESDFGWAAGAGATGSLTDWSAVQEEFGSPAPRLAEAAPRATPKRTPRAPAFGAGQGRIAGGVMDWPLGEFFRGVSDFNGGFSFGESGNSKADSGKLGDSAGGSPYYRSSEEERDANELFGQVPEIQWSVPALPSPPTASGLHWQHGGPDSGAFVPDICTPDGAGRCFPTASGAAKRQRNR

SEQ ID NO: 1387 - protein, 131 aa, Physcomitrella patens
SNTSSAKRKTPDRALDESEDIQPLDEPDPKKQTTKKEKKGAVKLNKRVRVPRYAIHTRSEIDVMEDGYKWRKYGQKAVKDSPFPRSYYRCTNQTCPVRKRVERKAGDAGLVVTTYEGTHSHLSPVTEAATV

SEQ ID NO: 1388 - protein, 246 aa, Triticum aestivum
MAPRAAEKAPVSPPTGLGLGLGGGVGVVAGGAHYRGVRKRPWGRYAAEIRDPAKKSRVWLGTYDTAEEAARAYDTAAREFRGAKAKTNFPFPSSSSSSPVAGAGGGGSPSSDSTLDSSGGGSGGCAQAPMQAIPLPPALDLDLFHRAAAVTAVAGGGMRFPFNGYPVAPRQPMHPYFFYEQAAAAAAAASGYRALKVAQPVTVAAVARSDSDSSSVVDLSPSPPAVTAHKAVAFDLDLNRPPPSED

SEQ ID NO: 1389 - protein, 262 aa, Arabidopsis thaliana
MGSIRGNIEEPISQSLTRQNSLYSLKLHEVQTHLGSSGKPLGSMNLDELLKTVLPPAEEGLVRQGSLTLPRDLSKKTVDEVWRDIQQDKNGNGTSTTTTHKQPTLGEITLEDLLLRAGVVSETVVPQENVVNIASNGQWVEYHHQPQQQQGFMTYPVCEMQDMVMMGGLSDTPQAPGRKRVAGEIVEKTVERRQKRMIKNRESAARSRARKQAYTHELEIKVSRLEEENEKLRRLKEVEKILPSEPPPDPKWKLRRTNSASL

SEQ ID NO: 1390 - protein, 188 aa, Physcomitrella patens
RRKTDKKSKDPVPPPRMIREPRVVVQTTSDVDILDDGYRWRKYGQKVVKGNPHPRSYYKCTNVGCPVRKHVERASNDPKAVITTYEGKHNHDVPAARNVGHDVAMQTAAPVAATARSLQDQGISFGNSFGQPPEDSASRWNRGSGDVELGMSVGLGPRVQGAREQGPLDATAVSLAASIGHPSFDDAR

SEQ ID NO: 1391 - protein, 118 aa, Physcomitrella patens
SMEQGQKMKGPKRPREPRYEFKTRSEVDVIDDGYKWRKYGQKPVKSSPHPRNYYRCTTANCPVRKRVERSIEDPGLIVTSYEGTHTHPKINRPKNSSGVGWTSNEFEGPQDLWSQVQN

SEQ ID NO: 1392 - protein, 247 aa, Petunia integrifolia subsp. inflata
MVFPNQEFESSSSQRKSGRGKIEIKRIENTTNRQVTFCKRRNGLLKKAYELSVLCDAEVALIVFSSRGRLYEYANNSVRATIDRYKKHHADSTSTGSVSEANTQYYQQEAAKLRRQIRDIQTYNRQIVGEALSSLSPRDLKNLEGKLEKAIGRVRSKKNELLFSEIELMQKREIEMQNANMYLRAKIAEVERATQQMNLMPGGGSEYQQQPMSSTSQPYDARNFLPVNLLEPNPHYSRQDQTALQLV

SEQ ID NO: 1393 - protein, 200 aa, Akebia quinata
AGIMKKAQELTVLCDAEVSLIMFSNTGKFTEYISPSVTTKQIFDQYQKVSGINIWQPHYERMQDNLNKQKEINNKLRREIRQRIGEDLNDLTIHELRGLEQNMESSLKTVRDRKFQVISTRTETHKKKFKNMQETHAKLLREFEGRDDEPHFAMAGHEGEYESVLGLGNGGSHVFAFRLQQNQPNLQSGGEFGMNDLRLA

SEQ ID NO: 1394 - protein, 219 aa, Ageratina adenophora
MATLIQFNTPYTSLSADNIPTTESSSTSDYSTGTSFSDEEVMLASKNPKKRAGRKKFRETRHPIYRGVRRRDSGKWVCEVREPNKKTRVWLGTYPTADMAARAHDVAALAMRGRSACLNFADSLWRLPIPESSNVKDIQKAAVKAAEAFRPTETDVAVIEESNELTGNVFCVDDESIFEMQGFLADMAEGMMLPPPRTIEYDNCQDDLEFFVDASLWSF

SEQ ID NO: 1395 - protein, 235 aa, Zea mays
MVSPENANWISDLIDADYGSFTIQGPGFSWPVHQPLAVSSNSSAGVDGSAGNSEASKEPGSKKRARCESSSATSSKACREKQRRDRLNDKFTELSVILEPGNPPKTDKAAILVDAVRMVTQLRGEAQKLKDTNSSLQDKIKELKTEKNELRDEKQRLKTEKEKLEQQLKAMNAPQPSFFPAPPMMPTAFASAAQGQAPGNKMVPFISYPGVAMWQFMPPASVDTSQDHVLRPPVA

SEQ ID NO: 1396 - protein, 272 aa, Ipomoea purpurea
MVNSSARWSPRVRKGAWSEEEDDLLRKCIQKFGEGKWHLVPFRAGLNRCRKSCRLRWLNYLHPDIKRGHFSLEEADLILRLHKLLGNRWSLIAGRIPGRTANDVKNYWHSHLKKKVVSMHMASSNSSRQDNNWDDEKGKAPQIKENILFRPRPRRFFRTSLSSPALSTLTGKAKAVVYDAPPPPPPPPHQLQPQPEATSPAADLLMVFNVQQNSNSIETNLPAQTTAPSSHDGVKWWEDLLYDDSHQGLIDWTTDDDFPIDVTLLKLLDTTI

SEQ ID NO: 1397 - protein, 125 aa, Triticum aestivum
  misc_feature (101)..(101): Xaa can be any naturally occurring amino acid
VPLVQSLLGKDQEGDDTGKKKKKKKGKGKAGNERKKPAPAYILWCKDQWAEIKKSPDAHFKEVSNALGAKWKTLSSEEKHPYEERYRQEKEAYLQVVGQEXREDDAIKLLDEEQMLWTAKEIAEQ

SEQ ID NO: 1398 - protein, 264 aa, Poa pratensis
MSRKKKVRRRSTGPDSVAEIIKKWKEQNQKLQEENGSRKAPAKGSKKGCMAGKGGPENSNCKYRGVRQRTWGKWVAEIREPNRGNRLWLGSFPTAVEAAHAYDEAARAMYGATARVNFSERSPDANSGCTSAPPVLMSNGPTAVSYPSDEKDESESPPSLMSDAPTATLHRSDAKGEPESAGTLVHEVKTEVSNDSRSIREERKTVEVFQPEGKALHKEEKVSYDYFNVEEVLDMIIVELSADRKMEVHEEYQDGDDGFSLFSY

SEQ ID NO: 1399 - protein, 172 aa, Coccidioides immitis RS
MSKPSGSSEPAGAVDVTTLSVPQLRALQTRLSTELEHLTTSHAKLRTAQSKFRECIRSIDAGVVKSATEKAEGKSEILVPLTNSLYVKGQLADREKVIVDVGTGFYVEKSTSKAIEFYNGKVEELQTNLRDLEKVLQAKTTNHRVIEDVLRQKLLAGEGAAVPSSSGGGGGA

SEQ ID NO: 1400 - protein, 270 aa, Zea mays
  misc_feature (220)..(220): Xaa can be any naturally occurring amino acid
MAQEDVHLDDAGLALGLSLGGGGGGGASAAARHGTSRSRLSTEAPRTLEPPSLTLSMPDEATATATGGSGGSGGAARSVSSRSVEGVKRERVDDAEGERASSTAAAAPAGAGAEDDDDGSTRKKLRLTKEQSKLLEDPAGVLFVFEQKQKIALAKQLKLRPRQVEVWFQNRRARTKLKQTEVDCELLKRCCESLSEENRRLQRELQELRALKLAGPHPQXVLPMLPAATLSLCPSCERLRGGPAAPKAEPDRPQAANHRFFNPFTHSAAC

SEQ ID NO: 1401 - protein, 284 aa, Arabidopsis thaliana
MMFEKDDLGLSLGLNFPKKQINLKSNPSVSVTPSSSSFGLFRRSSWNESFTSSVPNSDSSQKETRTFIRGIDVNRPPSTAEYGDEDAGVSSPNSTVSSSTGKRSEREEDTDPQGSRGISDDEDGDNSRKKLRLSKDQSAILEETFKDHSTLNPKQKQALAKQLGLRARQVEVWFQNRRARTKLKQTEVDCEFLRRCCENLTEENRRLQKEVTELRVLKLSPQFYMHMSPPTTLTMCPSCEHVSVPPPQPQAATSAHHRSLPVNAWAPATRISHGLTFDALRPRS

SEQ ID NO: 1402 - protein, 221 aa, Glycine max
MDRKRGRPEAAFNFNGGAKKSRPEMDSFPTGLGSKSKPCTKFFSTSGCPFGEGCHFLHYVPGGFKAVSQLINVGSNPVIPQVGRNPVPPSFPDGSSPPVVKTRLCNKFNTAEGCKFGDKCHFAHGEWELGRPTAPSYEDPRVMGQMPSSRVGGRVEPPHPAHGAAASFGASATAKISINASLAGAVIGKNGVNSKQICRVTGAKLSIRDHDTDPNLRNIEA

SEQ ID NO: 1403 - protein, 295 aa, Prunus mume
MSSSDLQLPPGFRFHPTDEELVKHYLCRKCQSQPISVPIIAEIDLYKYNPWDLPGLALYGEKEWYFFSPRDRKYPNGSRPNRAAGSGYWKATGADKPIGSPKPVGIKKALVFYAGKAPRGEKTNWIMHEYRLADVDRSPRKKSSSLRLDDWVLCRIYNKKGTVEKQQQQQQQQQQQTTSRMSSGSEFEDRKPENLACPPPPAAVAPTRPNDYVYFDTSDSVPRLHTDSSCSEHVVSPEFTCEVQSEPKWKEWEKALDFNYNYMDTSVENGFGPQFQSANQMSPLQDIFMYLQKPY

SEQ ID NO: 1404 - protein, 71 aa, Physcomitrella patens
KAISTKLADIPPDEYSWRKYGQKPIKGSPHPRGYYKCSSIRGCPARKHVERSMEDSTMLIVTYEGEHNHLR

SEQ ID NO: 1405 - protein, 216 aa, Gossypium hirsutum
MDFLVQDYDMVDSGSVSESGTDRPVNFSDGYVMLASSYPKRRAGRKKFRETRHPVYRGVRRRNPGKWVSEVREPNKKSRIWLGTFPKADMAARAHDVAAIALRGKSACLNFADSAWKLPVPASSDPKDIQKTVAEVAETFRTAEHSSGNSRNDAKRSENTEMEKGFYLDEEALFGTQRFWANMAAGMMMSPPRSGHDGGWEEHEVDDYVPLWSYSI

SEQ ID NO: 1406 - protein, 224 aa, Physcomitrella patens
TAKVHHLLHSAQQGQQTQQGLPEHILRPLAAAYRPVLPPNPFNKLDVSYKGPSPGNSSLSSGPLESATTVSFSNISVDRKSQQTGKSSDHPSLLPPRPQASNSRKKCSGKSDENGATCAILGRCHCSKRRKLRLKRTIQVRAISSKLADIPPDDYSWRKYGQKPIKGSPHPRGYYKCSSIRGCPARKHVERSMEDPTMLIVTYEGEHNHPQSSSANGGLSVQSQ

SEQ ID NO: 1407 - protein, 855 aa, Cryptococcus neoformans var. neoformans B-3501A
MADDIRSWITKVLIDHDIRYGANFKVPVKCKHYCQLLKFYTYRDDRNPRAQIEGSIGDRTHCVKVVFDPEETDKFEQPDPDTGYKHSLTSQLRSIFQIKEFHIHIAPPSPLAGTKIPIVTFFVTKWDVVSGNHDEPVYWLDTCKIGEGNNDGKVRDVLKKWWSGESNSESSQNRSSQNILSQGNIPDMSISAARPRGNKDVAHYYRTTVALGDIVSIEEAKASRVGEWDAQSALAWLERNQDTVLNTHAQYRNYPSNNAETIKSLQHSQGKTVREPSDHGYPPESQPIEGISRNSRSPHLSNRRSPPGSSQSHHISSSSLLHASPTKCQFSKEKITDPLNFPSSPATNMSPGNTDEELLSPYEREERRKRSRKSKAIREDGNKELEQSSPSPSQLSQLSWLSPPSPTMATPRKSGAELSRSDRPVPELSPSGNATISNARDKWKRPRESLNSKGQSRIVVWDEDEDSDEEPMVKNGLKRKIILSSSEPSPQVIEIQDSSGDEENFAQTSSSLTTKRNAMLRTREATRPIKTPSNSNVLNGISADRRTCKDGDEKEENGRGKGGNALGGEEKTMVEEKEEKEEKEEKEETGIEEEEDEEEEQEEEEEDEEEEEKIEEDEEEEEEKEEEEGKIEEEEKEKEIEEEEEKIEEEEEEEEIEEEEEEEEEEEEEEEEEEEEEVEEEEEEEEEVEEMEEEEELKDDREIEGKKEEEEQQTGEKKEGIQVKLGEKRTEGGVRGRTMKKTEISIKEENDDVDGNRVQRRLENERLARMDVLRMEKEMDEAQTPPVLEGGNEILRRKRKHRAEDPTSNQHVPKFGGFKLDMTLREGGLDEACVLQMLEWAREKRQEIAKRAKKP

SEQ ID NO: 1408 - protein, 288 aa, Glycine max
MGAPKQKWTSEEEEALRRGVLKHGAGKWRTIQKDPEFSPVLSSRSNIDLKDKWRNLSFSASGLGSRDKQRVPRPKAPSSSPSPSPQLLLLSAPNNVAEASPPEDCEKSPQDDKTPSPKLYSSMILEALGELKEPNGSEVATICNFIEQRHEVQPNFRRLLCAKLRRLIGVNKVEKIDKSYKLTDSYAKRALAPMKDPSLKKKDSAKSSKAAKGLGQSSPALDAAEAAAMKVADAEAKSHLANEHMMEVERIGKMAEETESLLELASELYERCSRGEALTILQVAHREF

SEQ ID NO: 1409 - protein, 183 aa, Physcomitrella patens
  misc_feature (12)..(12): Xaa can be any naturally occurring amino acid
FNNKHDVSNKGXSPGNSSLNSGPPESATTVSFSNMSVDRISQQTGKSLEQPSPLPPRPQASNSRKRCSGKSDENGATCAILGRCHCSKRRKLRLKRTIKVRAISSKLADIPPDDYSWRKYGQKPIKGSPHPRGYYKCSSIRGCPARKHVERSMEDPTMLIVTYEGEHNHPQLSANGGLTVQSH

SEQ ID NO: 1410 - protein, 139 aa, Brassica napus
MREEDSNWFAKWEEELPSPEELIPLSQSLITPDLAIAFDLRSPNQPQPQTTPPPQQTNSSAEFAVDSSGDEPARTLKRPRLVWTPQLHKRFVDAVAHLGIKNAVPKTIMQLMSVDGLTRENVASHLQKYRLYLKRMQSG

SEQ ID NO: 1411 - protein, 510 aa, Arabidopsis thaliana
MSSTFNPAASSPDEMMDLQEETGEVKIEDQCVENKQSTPASCSSVSEGSAGSSHKSPTIASPATVSPTHRYLGRTSGPIRRAKGGWTPEEDETLRQAVDTFKGKSWKNIAKSFPDRTEVQCLHRWQKVLNPDLIKGPWTHEEDEKIVELVEKYGPAKWSIIAQSLPGRIGKQCRERWHNHLNPDINKDAWTTEEEVALMNAHRSHGNKWAEIAKVLPGRTDNAIKNHWNSSLKKKSEFYLLTGRLPPPTTTRNGVPDSVTKRSSSAQKRVFGSVAQTSSVTTDVNNLAEDGNGQINSSVPVEEVVAASRMTSLNEYARSPQLPNPEPLPENGGAANNGYHLYYTPQIDYYRASEVDTQRMYGNECGCSPSASPVSFFTPPPCRNVHSNGSTPRSPESYLREAGRTYPNTPSIFRKRRPRVVVQDNNNAKKTDEAKEVDQKVNDGKDSSEIQNNGSNAYNLSPPYRIRSKRTAVFKSRQLEFISREEEKADDETKSSEKDMLIDGDSQLLG

SEQ ID NO: 1412 - protein, 150 aa, Zea mays
MASPARIELDKLSVEQLKGLKEQTDLEVNLLQDSLTKIRTAATRLENASAALQDLSLRPQGKKMLVPLTASLYVPGSLDDAEKVLVDVGTGYFIEKTMAQGKEYCERKINLLKSNFDELVEVATKKKAIADDMGLLLQAKLRQASPGPSS

SEQ ID NO: 1413 - protein, 155 aa, Brassica rapa
MPVPLAPYPTPPATPLAPAYTPPSPANGSTGGQSQLVCSGCRNLLMYPVGATSVCCAVCNAVTAVPPPGTEMAQLVCGGCHTLLMYIRGATSVQCSCCHTVNLALEANQVAHVNCGSCKMLLMYQYGARSVKCAVCSFITSVGGSTSTTDQKLNN

SEQ ID NO: 1414 - protein, 349 aa, Oryza sativa (japonica cultivar-group)
MDPGRVVFDSGVARRACPGGAQMLLFGGGGSANSGGFFRGVPAAVLGMDESRSSSSAAGAGAKRPFFTTHEELLEEEYYDEQAPEKKRRLTAEQVQMLERSFEEENKLEPERKTELARRLGMAPRQVAVWFQNRRARWKTKQLEHDFDRLKAAYDALAADHHALLSDNDRLRAQVISLTEKLQDKETSPSSATITTAAQEVDQPDEHTEAASTTGFATVDGALAAPPPGHQQPPHKDDLVSSGGTNDDGDGGAAVVVFDVTEGANDRLSCESAYFADAAEAYERDCAGHYALSSEEEDGGAVSDEGCSFDLPDAAAAAAAMFGAAGVVHHDAADDEEAQLGSWTAWFWS

SEQ ID NO: 1415 - protein, 98 aa, Arabidopsis thaliana
SSSMSSQSSGSWTAKQNKAFEQALATYDQDTPNRWQNVAKVVGGKTTEEVKRHYELLVQDINSIENGHVPFPNYRTSGGCTNGRLSQEEKRMRNMRLQ

SEQ ID NO: 1416 - protein, 608 aa, Malus x domestica
MAPKANADGRTRSSVQIFIAAGLCCFFYILGAWQRSGFGKGDSIALAITKNEADCNIIPSLSFDSQHAGEVGNIDESESKPKVFEPCHHRYTDYTPCQDQKRAMTFPREDMNYRERHCPPEEEKLHCLIPAPKGYVTPFPWPKSRDYVPYANAPYKSLTVEKAVQNWIQYEGNVFRFPGGGTQFPQGADKYIDQLAAVIPIKNGTVRTALDTGCGVASWGAYLLSRNVLAMSFAPRDSHEAQVQFALERGVPAVIGVLGTIKLPYPSRAFDMAHCSRCLIPWGINDGKYLKEVDRVLRPGGYWVLSGPPINWKNNYQAWQRPKEDLQEEQRQIEEAAKLLCWEKKSEKGETAIWQKRVDSDSCGDRQDDSRANFCKADEADSVWYKKMEGCITPYPKVSSGELKPFPKRLYAVPPRISSGSVPGVSVEDYEEDNNKWKKHVNAYKRINKLIDTGRYRNIMDMNAGLGGFAAAIESPKLWVMNVMPTIAEKNTLGVVYERGLIGIYHDWCEGFSTYPRTYDLIHAHGVFSMYNGKCNWEDILLEMDRILRPEGAVIFRDEVDVLIKVKKIVGGMRWDTKLVDHEDGPLVPEKVLVAVKQYWVGNSTSAQ

SEQ ID NO: 1417 - protein, 127 aa, Zea mays
  misc_feature (16)..(16): Xaa can be any naturally occurring amino acid
  misc_feature (32)..(32): Xaa can be any naturally occurring amino acid
  misc_feature (46)..(46): Xaa can be any naturally occurring amino acid
AARFLNQLQGEAPKLXPSNESLPESLKSFKAXKSQLRDEKTRLKAXKERLEQMLKGVVSPPAVGGPGPFVPPPGAVGPSFPPPPAGFAQAGKFVPYPSYPPPGGFWQWIPPTSLDTTKGPAPWPPVA

SEQ ID NO: 1418 - protein, 190 aa, Triticum aestivum
  misc_feature (184)..(184): Xaa can be any naturally occurring amino acid
MRHPSPPPELPAAGGEIQAMAPASAAGSSSTGGSTGGSFTALLGLPTSQAIELLLPGAAPAPAPAFPSDPHLVDRAARFSAFASPSPSPTPPPPASAGKRKADPASKGKVAKKGKTTAAGGEEKDSGEDEKPAYVHVRARRGQATDSHSLAERARREKINARMELLKELVPGCSKVSGTALVLXEIINHV

SEQ ID NO: 1419 - protein, 427 aa, Arabidopsis thaliana
MENFVDENGFASLNQNIFTRDQEHMKEEDFPFEVVDQSKPTSFLQDFHHLDHDHQFDHHHHHGSSSSHPLLSVQTTSSCINNAPFEHCSYQENMVDFYETKPNLMNHHHFQAVENSYFTRNHHHHQEINLVDEHDDPMDLEQNNMMMMRMIPFDYPPTETFKPMNFVMPDEISCVSADNDCYRATSFNKTKPFLTRKLSSSSSSSSWKETKKSTLVKGQWTAEEDRVLIQLVEKYGLRKWSHIAQVLPGRIGKQCRERWHNHLRPDIKKETWSEEEDRVLIEFHKEIGNKWAEIAKRLPGRTENSIKNHWNATKRRQFSKRKCRSKYPRPSLLQDYIKSLNMGALMASSVPARGRRRESNNKKKDVVVAVEEKKKEEEVYGQDRIVPECVFTDDFGFNEKLLEEGCSIDSLLDDIPQPDIDAFVHGL

SEQ ID NO: 1420 - protein, 205 aa, Triticum aestivum
MENYPILFGTQPSSSTSNSYHFMAGASSHDHLHHHGQAAGNNTGGGGGLGQGLFSGSKQEDPSESKDGGDDRAGSSSQGGGEADVVVGKKKGEKRERRPRFAFQTRSQVDILDDGYRWRKYGQKAVKNNNFPRSYYRCTHQGCNVKKQVQRLSRDEGVVVTTYEGTHTHPIEKSNDNFEHILTQMQVYSGINNVSQTFGNQHMFQ

SEQ ID NO: 1421 - protein, 265 aa, Zea mays
MFSMCSTAGCPFGASCHFLHNFPGGYQAVSKMTNLGGPPVPAPPGRMPMGPGGPDGPPSPAVKTRMCNKYNTAEGCKWGSKCHFAHGERELGKPLQMDNPMGPPPMGPGPNGHFMPPPMPFPDMVPPSTFGASATAKISVDASLAGAIIGKGGTNTKHISRVTGAKLAIRDNEADPNHKNIELEGTFDQIKHASAMVTELIVRISGKPPPQAKNNPGRGPGSHAGGPGSNFKTKLCENFNKGSCTFGDRCHFAHGEGELRKPAAA

SEQ ID NO: 1422 - protein, 207 aa, Ostreococcus tauri
MASRRKDWLALVAVHGDAWLMAVAFYYGAKFDAKKRDALFAKINGVSTVYETLCAAHGRDDKAHESEASARNGGSSNGGAKARGGDAARSNGVKAKKVKIDPADAQGFNKPSPGFILEPSQPLSELKNAQIEVRIPVPGVRLRTIDDATATQLFWPDDNLWYRAEVISLNERNRTAKVLYATSDVETLDLDELIQEGHVNIRRDPQQ

SEQ ID NO: 1423 - protein, 575 aa, Zea mays
MATALLLELAAADDVVAFRRAAEDDKAPALDAVGHWYGPSAAGAGAAAGRPRLEARTPTMVAALYGSTAVLAYVLSSAPAEAARASPTDGATPLHLAAAGGAPAAVAAAHILLAAGASADARAFSGLRAGDLLLPRAAAAAAADADRALRVLLKSPAASPSSSPKKSASPPPAPEARKEYPPDLTLPDLKSGLFSTDEFRMYSFKVKPCSRAYSHDWTECPFVHPGENARRRDPRRYSYSCVPCPEFRKGGACRKGDGCEYAHGVFECWLHPAQYRTRLCKDEVGCARRICFFAHKREELRAVNPSAVSVGMQMQPTVSPPPPSGLGDMLSPAAWPSSPASRLNKAALGGGRDLDLDQYQHMLFDTVSSPRANWGSAGGIGSPLPPARAVPDYADLLGSVDAASMLSQLHALSLKQAGGDMPAYGSMVADTQPHMATTSPMVGLGSSTAFGLDHSMAKAILSSRASAFAKRSQSFVDRGGRAPAARSLMSQQAAAAGAPPVLSDWASPDGRLDWGVQGDELHKFRKSASFAFRGQSPAPAPAPAEPDVSWVNSLVKDGHAGDIFAQWSEQEQMVA

SEQ ID NO: 1424 - protein, 285 aa, Glycine max
  misc_feature (105)..(105): Xaa can be any naturally occurring amino acid
MGLDQDANSSGLHLVLGLSLTASVKETAPSTKPDDHHLCVIKPTPTKPYPSKEPSLTLGLSGKGYHVPRNNVAINKVYCEDPLEFSRQTSPHSVVSSFSTGRVIXRERDLSCEDMEVDAEAEERVSSRVSDEDEDGTNARKKLRLTKEQSALLEESFKQHSTLNPKQKQALARRLNLRPRQVEVWFQNRRARTKLKQTEVDCEFLKKCCETLKDENRRLKKELQELKALKLAQPLYMPMPAATLTMCPSCDRLGGVNDNGSNKSPFSMAPKPHFYNPFANPSAAC

SEQ ID NO: 1425 - protein, 198 aa, Trollius laxus
TGILKKAGELNVLCDAEVSLIMISNTGKLTDFFSPNISPKAFFDKYQHVSGVDLWERHYVRLQDTLMQLKETNTRLRREIGQRVGGDLSGLSLTDLRALELDLQSSAKIVRMRLYKLISTQTDTFKKKVRNLEEINANLVHEYEERVEEAYEIANHEAMSALELANAGSHMFGFRLQPSQPNLHDDGGAYGLHDLRLG

SEQ ID NO: 1426 - protein, 211 aa, Arabidopsis thaliana
MARGKIQLKRIENPVHRQVTFCKRRTGLLKKAKELSVLCDAEIGVVIFSPQGKLFELATKGTMEGMIDKYMKCTGGGRGSSSATFTAQEQLQPPNLDPKDEINVLKQEIEMLQKGISYMFGGGDGAMNLEELLLLEKHLEYWISQIRSAKMDVMLQEIQSLRNKEGVLKNTNKYLLDKIEENNNSILDANFAVMETNYSYPLTMPSEIFQF

SEQ ID NO: 1427 - protein, 166 aa, Capsicum frutescens
MAANNPSANMLDGSFRSLDSPDSDDFSNHLINFELSDILEIDNWPIQQDPTLIPQYSNYAANQVVNTSSYQEEPSNNIGSSSSKRKEVKDKVAFRTLSQIEILDDGYKWRKYGKKMVKNSPNLRNYYRCSVEGCPVKKRVERDKEDSRYVITTYEGVHNHQGLSPF

SEQ ID NO: 1428 - protein, 292 aa, Glycine max
MKIQCNVCEAAEAKVLCCADEAGLCWECDEKVHAANKLASKHQRVPLSTSSSHMPKCDICQEALGYFFCLEDRALLCRKCDVAIHTANAYVSGHQRFLLTGVRVGLEATDPGASSTSLKSDSGEKVSDSSVSRKVSTAPQPSNYNEVLPAEVGGVGEFPSAKVSFGGGSTAGNISQWTIDEFIGLNEFSQNYDYMEGSSRADGGKLGDSDSPVLRSGEEEMEEEDDYLERVPDSSWTVPQIPSPPTSSGLCWPKDHTNLYGSSDSVLFVPDISFSHLQQSQISIFLRRRRQL

SEQ ID NO: 1429 - protein, 211 aa, Castanea mollissima
MGRGRVEVKRIENKINRQVTFAKRRNGFLKKAYELSVLCDAEVALIIFSNRGKLYEFCSTSSMLKTLERYQKCSYGAVEVNKPGKELEISYREYLKLKARFESLQRTQRHNICWTSFLISKIRNTYLVEANRALTIKLDEISSRNNLRQSWEGGEQSMSYGPQNAHSQSFFQPLDCNPTLQIGYNASGSDQQLSGTTHAQQVNGFIPGWML

SEQ ID NO: 1430 - protein, 649 aa, Arabidopsis thaliana
KVVYFFYIRKNCGAPSSLQRKHHLLKNPPHTPFFLKNPPQHNSHLFLHHHLLQSKNIPTFFSISFQDSIMCSGPKSNLCSSRTLTEIESRQKEEETMLLLEFAACDDLDSFKREVEEKGLDLDESGLWYCRRVGSKKMGLEERTPLMVAAMYGSIKVLTFIVSTGKSDVNRACGEERVTPLHCAVAGCSVNMIEVINVLLDASALVNSVDANGNQPLDVFVRVSRFVASPRRKAVELLLRGGGVGGLIDEAVEEEIKIVSKYPADASLPDINEGVYGSDEFRMYSFKVKPCSRAYSHDWTECAFVHPGENARRRDPRKYPYTCVPCPEFRKGSCPKGDSCEYAHGVFESWLHPAQYKTRLCKDETGCARKVCFFAHKREEMRPVNASTGSAVAQSPFSSLEMMPGLSPLAYSSGVSTPPVSPMANGVPSSPRNGGSWQNRVNTLTPPALQLNGGSRLKSTLSARDIDMEMEMELRLRGFGNNVEETFGSYVSSPSRNSQMGQNMNQHYPSSPVRQPPSQHGFESSAAAAVAVMKARSTAFAKRSLSFKPATQAAPQSNLSDWGSPNGKLEWGMKGEELNKMRRSVSFGIHGNNNNNAARDYRDEPDVSWVNSLVKDSTVVSERSFGMNERVRIMSWAEQMYREKEQTVV

SEQ ID NO: 1431 - protein, 146 aa, Burkholderia xenovorans LB400
MRRVIVRRSSIHGKGVFAMRPLAAGERVLEYKGEIMAWREAVRRHRREGVAGHTFLFGLSDGRVIDGSRGGNSARWLNHACEPNCETIEDAGRIFIHTLRPIEAGEELFIEYLLTVDDPVDDDIRRQYACRCAAPGCRQSMLADAA

SEQ ID NO: 1432 - protein, 428 aa, Sorghum bicolor
MSISVNGQSVVPPGFRFHPTEEELLTYYLKKKVASERIDLDVIRDVDLNKLEPWDIQEKCRIGSGPQNDWYFFSHKDKKYPTGTRTNRATAAGFWKATGRDKAIYASGARRIGMRKTLVFYKGRAPHGQKSDWIMHEYRLEPALDVDAAAGSASAHHAAAGAAADHHPYYTSSSPPALPTAIRGAAGDQQAAQEQEGWVICRVFKKKNLVHHGQSSGGGVTAAGSKMASAAAPMEGSPSHCSSVTVISDHTMNKHQAQAMLQHSASDDDALDHILQYMGGGGGKQPDTKPVLLDHHHHHHLAAAATTTTTACSAGGAGLYGKFMKLPPLEHAGGGGGLLPSPAGACDYGAADASGIADWDALDRLAAYELNGLSDASKNMSAFFDEPSATAAFSSSSSSVHAAAVDGDLWSLARSVSALHADLTMNNV

SEQ ID NO: 1433 - protein, 195 aa, Helleborus orientalis
SGIVKKARELSVLCDAQVALIMFSSTGKLSEYMSPSTTPKKVYDQYQQIMGTSLWNSHYEKMQESLKKQKETNLKLRKEIGQRIGEGIDHLSFDELRGLEQDLDGSLKVVRDRKYHMISTQTETYRKKLRNLQETHTHLLREFEIRGEDPYYDGDYESILGMSNGGEHILSYRLQPSEANLQDAECYGSYNLQLA

SEQ ID NO: 1434 - protein, 261 aa, Capsicum annuum
MALEALNSPTGTPTPPPFQFESDGQQLRYIENWRKGKRSKRSRSMEHQPTEEEYLALCLIMLARSGGSVNHQRSLPPPAPVMKLHAPSSSSAAEEEKEKMVYKCSVCGKGFGSYQALGGHKASHRKLVPGGDDQSTTSTTTNATGTTTSVNGNGNRSGRTHECSICHKCFPTGQALGGHKRCHYDGGIGNGNANSGVSASVGVTSSEGVGSTVSHRDFDLNIPALPEFWLGFGSGEDEVESPHPAKKSRLCLPPKYELFQH

SEQ ID NO: 1435 - protein, 362 aa, Medicago truncatula
MHNNNVSVGSPQQLVTTNTLPQEMNMNISVGNSIVTTIGTSIVALEAPTVTPTTTTPGSLDLFGKKKRGRPRKYDADGNLNPSYKKIVKTTTPILTSPPGFTLSTNEFASKKGRGKSTGFVNYQTFSSFGEVFPSTAAVDFAPHVVTVYAGEDVGGKILSFAQKSPRGICILSANGAISKVALGQPGSTGGSILTYEGRFEILSLSGSYTASDNSGIRTREGGLSVSLAGPDGRVIGGAVAGVLIAAGPIQIVVGSFMSNGNNSKPLKRKYQREQTVASPTSTGPEIVTAARPISQANIHGENFMIPIMSHQLPDQIQRESINVSSDKLNLDATPDDDTWNSSDEYSDQRTSPDINISLPDE

SEQ ID NO: 1436 - protein, 357 aa, Medicago truncatula
MEASSSSSSAIAQQTWELENNIIPMETPSDDSIFHYDEAGQAEFQRDKPWANDPHYFKRVKISALALLKMVVHARSGGTIEVMGLMQGKTDADSIIVMDAFALPVEGTETRVNAQADAYEYMVDYSQTNKQAGRLENVVGWYHSHPGYGCWLSGIDVSTQMLNQQFQEPFLAVVIDPTRTVSAGKVEIGAFRTYPEGYKPADDPISEYQTIPLNKIEDFGVHCKQYYSLDITYFKSSLDSHLLDLLWNKYWVNTLSSSPLLGNGDYVAGQISDLAEKLEQAENQLAHSRFGPLVAPTPRKKEEESPLAKITRDSAKITVEQVHGLMSQVIKDILFNSVHQANKSRTETSDPEPMIES

SEQ ID NO: 1437 - protein, 179 aa, Ralstonia solanacearum GMI1000
MPRSSAAAKDSDAHQPTPPEAAGLRRRDRIAVRESGVHGRGVYAVAAIAKGKKIIEYKGEHISWKEALRRHPHDPDDPNHTFYFSLEDGSVIDAKYGGNRARWINHACKPNCEAREKDGRVFIHALRDIDAGEELFYDYGLVIEGRQTKALKAQFACHCGAKKCRGTMLAPPEKKEKKQ

SEQ ID NO: 1438 - protein, 265 aa, Arabidopsis thaliana
MVAYPTKKTAIKQFLHCNSQATFKLKLERQEILRIFNLMALEALTSPRLASPIPPLFEDSSVFHGVEHWTKGKRSKRSRSDFHHQNLTEEEYLAFCLMLLARDNRQPPPPPAVEKLSYKCSVCDKTFSSYQALGGHKASHRKNLSQTLSGGGDDHSTSSATTTSAVTTGSGKSHVCTICNKSFPSGQALGGHKRCHYEGNNNINTSSVSNSEGAGSTSHVSSSHRGFDLNIPPIPEFSMVNGDDEVMSPMPAKKPRFDFPVKLQL

SEQ ID NO: 1439 - protein, 256 aa, Arabidopsis thaliana
MTEGGEYSPAMMSAEPFLTMKKMKKSNHNKNNQRRFSDEQIKSLEMMFESETRLEPRKKVQLARELGLQPRQVAIWFQNKRARWKSKQLETEYNILRQNYDNLASQFESLKKEKQALVSERLKEATQKKTQEEERQCSGDQAVVALSSTHHESENEENRRRKPEEVRPEMEMKDDKGHHGVMCDHHDYEDDDNGYSNNIKREYFGGFEEEPDHLMNIVEPADSCLTSSDDWRGFKSDTTTLLDQSSNNYPWRDFWS

SEQ ID NO: 1440 - protein, 230 aa, Zea mays
  misc_feature (84)..(84): Xaa can be any naturally occurring amino acid
MEVAAASAAGYGFKADDDVDSLRATELRLGLPGTEEEEAEESQNKAPPPPPSTPRGKKRDVVASSGPEDAPKKRDCETDTDAAXPPAAKAQLVGWPPVRSYREELASSSRAAAKNKPAAALAEEAPAAGGLFVKVSMDGAPYLRKVDLKMYKGYRELREALEAMFLCFSGAGAADAPAVNPSDFAVTYEDKDGDLMLVGDVPFGMFISTCKRLRIMKGSEARGLGSAKNN

SEQ ID NO: 1441 - protein, 179 aa, Nicotiana tabacum
MECVMAHEKDLNLKATELRLGLPGTEDESIVSSSKNKKRGLPESAEDEDCESKKKTQIVGWPPVRSYRKNNIQPKKTETECGMYVKVSMDGAPYLRKIDLKMYKGYAELLKALENMFKLSIGEYSEREGYNGSEFAPAYEDKDGDLMLVGDVPWDMFLSSCKRLRIMKGSEARGLGCGV

SEQ ID NO: 1442 - protein, 176 aa, Nicotiana tabacum
QKKDLNLKATELRLGLPGSRSPNFVSSSKEYQGGLPESAEEEDCGPKKRRHQLVGWPPVRSYRKNNIPTQRKTETECGMYVSKVSMDGAPYLRKIDLEMYKGYSELLKALENMFKLNIGEYSEREGYKGSEFAPAYEDKDGDLMLVGDVPWDMFLSSCKRLRIMKGAEARGLGCGV

SEQ ID NO: 1443 - protein, 142 aa, Zea mays
MSSASNSAKGSSPSSSTSSQWTKPQNKLFERALAVYDTDTPDRWHNVARYMGGTTSVEEVRRRYQQLAVDVAQIESGEVPFHYWYAAAPPLHPATLVMSMCDLSTIYMVFRSMSYSKVAVLITITKDQPSKSSRKKSQPWVF

SEQ ID NO: 1444 - protein, 202 aa, Nicotiana tabacum
MERTATYEKDLNLEATELRLGLPGINEPEKQSSSASTSAKYSKKRTSSEMDNSSSGKENEQDSAPAPKAQVVGWPPVRSYRKNVLQVKKSESDNSSGMYLKVSMDGGTYLRKIDLKVYKSYPELLKALQNMFKCTIGVYTEREGYNGSEYAPTYEDKDRDWMLVGDVPWDMFINSCRRLRIMKGSEAKGLHAYRLWTYRPSN

SEQ ID NO: 1445 - protein, 440 aa, Triticum aestivum
MSFRSIVRDVRDSFGSLSRRGFDIRILGNGRGRSHGAVHELHDPVPVIQSSCWANLPSELLRDVIERLEASEATWPCRKNVVACAAVCRTWREMCKEIVKNPEFCGKITFPVSLKQPGPRDGTMQCFIKRDRSTQTYYLYLCLTSAVLVENGKFLLSAKRICRATCTEYIISMNANSISRSTDTYIGKMRSNFLGTKFVMYDTQPPYNASSVSHSGTTSRRFYSKKGLTKVPCSTYSIAQVSYELNVLGTRGPRRMRCVMHSIPASSLEAGGSVPCQPDIIFSRSLDESFSSMPVSKSSVMDHSMRFSSARFSDVSIGGGPAIRGQALSDGDDSKDTPLILRNKVPRWHEQLQCWCLNFRGRVTVASVKNFQLTAAAQPAAGAPTPPHPAPAPPPEHDKVILQFGKVAKDMFTMDYRYPLSAFQAFALSLSSFDTKLACE

SEQ ID NO: 1446 - protein, 548 aa, Arabidopsis thaliana
MGRSKLASRPAEEDLNPGKSKRKKISLGPENAAASISTGIEAGNERKPGLYCCNYCDKDLSGLVRFKCAVCMDFDLCVECFSVGVELNRHKNSHPYRVMDNLSFSLVTSDWNADEEILLLEAIATYGFGNWKEVADHVGSKTTTECIKHFNSAYMQSPCFPLPDLSHTIGKSKDELLAMSKDSAVKTEIPAFVRLSPKEELPVSAEIKHEASGKVNEIDPPLSALAGVKKKGNVPQAKDIIKLEAAKQQSDRSVGEKKLRLPGEKVPLVTELYGYNLKREEFEIEHDNDAEQLLADMEFKDSDTDAEREQKLQVLRIYSKRLDERKRRKEFVLERNLLYPDQYEMSLSAEERKIYKSCKVFARFQSKEEHKELIKKVIEEHQILRRIEDLQEARTAGCRTTSDANRFIEEKRKKEAEESMLLRLNHGAPGSIAGKTLKSPRGLPRNLHPFGSDSLPKVTPPRIYSGLDTWDVDGLLGADLLSETEKKMCNETRILPVHYLKMLDILTREIKKGQIKKKSDAYSFFKVEPSKVDRVYDMLVHKGIGDST

SEQ ID NO: 1447 - protein, 286 aa, Zea mays
MHIREEEATPSTVTGIMSTLTSAGQQKLKEPISPGGGSASVAGSAAERNNGGRGKGKTEIKRIENTTNRQVTFCKRRNGLLKKAYELSVLCDAEVALIVFSSRGRLYEYANNSVKGTIERYKKATSDNSSAAGTIAEVTIQHYKQESARLRQQIVNLQNSNRALIGDSITTMSHKELKHLETRLDKALGKIRAKKNDVLCSEVEYMQRREMELQNDNLYLRSRVDENERAQQTANMMGAPSTSEYQQHGFTPYDPIRSFLQFNIVQQPQFYSQQEDRKDFNDQGGR

SEQ ID NO: 1448 - protein, 289 aa, Arabidopsis thaliana
MDGHQHPHLHQLQYLNKHHLHTQSQTPEIASPVAVGDRFPQWSVEETKELIGIRGELDQTFMETKRNKLLWEVISNKMRDKSFPRSPEQCKCKWKNLVTRFKGCETMEAETARQQFPFYDDMQNIFTTRMQRMLWAESEGGGGGTSGAARKREYSSDEEEENANEELVDVSNDPKILNPKKNIAKKRKGGSNSSNSNNGVREVLEEFMRHQVRMESEWREGWEAREKERAEKEEEWRRKMEELEKERLAMERMWRDREEQRRSREEMRAEKRDSLINALLAKLTRDGSL

SEQ ID NO: 1449 - protein, 195 aa, Nicotiana tabacum
MERTATYEKDLNLKATELRLGLPGIDEPEKQSSSASTSAKYSKKRTSSEMDNSSSGKENEQDSAPAPKAQVVGWPPVRSYRKNVLQIKKSESDNSSGMYLKVSMDGGTYLRKIDLKVYNSYPELLKALQNMFKCTIGVYTEREGYNGSDYAPTYEDKDGDWMLVGDVPWDMFLNSCRRLRIMKGSEAKGLHAYRL

SEQ ID NO: 1450 - protein, 250 aa, Brassica napus
  misc_feature (149)..(149): Xaa can be any naturally occurring amino acid
  misc_feature (172)..(172): Xaa can be any naturally occurring amino acid
  misc_feature (185)..(185): Xaa can be any naturally occurring amino acid
MAVDLMRFPKMDDQKAIQEAASQGLQSMEHLIRVLSTNRPEQQSNVDCSEITDFTVSKFKTVISLLNRTGHARFRRGPVHSTSSSPLIQQSQIVKTAQPEAPVVSQPARATTSLPPSRPSVTLDFTKPSIFGSNSKSSELEFSKENFSXVSLSSSFMTSALTGDGSVSKGSXSSAPSQTVTSSGXPPLAGGQPYRKRCIEHEHSQNFSGKISGSGHGKCHCKKSRKNRPKRTVRVRAISSKIADIQPDEF

SEQ ID NO: 1451 - protein, 258 aa, Zea mays
IENNTSRQVTFCKRRNGLLKKAYELSVLCDAEVALIVFSSRGRLYEYANNSVKATVERYKKAHTVGSSSGPPLLEHNAQQFYQQESAKLRNQIQMLQNTNRHLVGDSVGNLSLKELKQLESRLEKGISKIRARKSELLAAEISYMAKRETELQNDHMTLRTKIEEGEQQLQQVTVARSVAAAAAATNLELNPFLEMDTKCFFTGGPFATLDMKCFLPGSLQQMLEAQQRQMLATELNLGYQLAPPGSDAANNNPHHQF

SEQ ID NO: 1452 - protein, 520 aa, Oryza sativa (indica cultivar-group)
MPSSPSSSAASVDAPPPPPELSHPPYSPSHADLSPPLQEVYSLYNPDDPPASETHLPPYAPPPAPVVSELPDDLEFGLHPPPPLVRASELLGWEDRPSSSTASSSFLPDTAARYWRLLEQTGSRWLRARRFRSDLPPLSSEAYPAGRDAAAVPVLQHEPMNDTVEHNKVAADGAEVGASEESEEQGRSAATFECNICFDMASEPVVTSCGHLFCWPCLYQWLNVYSNHKECPVCKGEVTEANITPIYGRGNSCLDAEKAVEGGKQTGPTIPPRPHGNRLESFRQQFHHLRPISRRLGEAHGLLSSWRRLLDQQIMNTASRFEGPPESAVQEMVDTAHAQHTSRLSRLASRMRARRLLREADNPNPPDGGSTSPDSGLIRNNASDPSRNGPSSLLPDGIDWLRGLTLLGYEDTERFASAMSDFRRITGPSQYGASASSSNPPNLESTFDRTHVVAAPSADQASNSSTAAVIQGDAGISESAGEPSNAGSSRSLRRRGRSSALGSLDADGGGLQRNKRRRIN

SEQ ID NO: 1453 - protein, 355 aa, Gibberella zeae PH-1
MSSSSTTTTTSPYPFATAPDIIRSHQKDAYFTGHLAQILSDLHRRLRGARLTHTRAPEIQTLATLAYFALTTIPGNRTLGEEYCDLVQIDARDGQLPAIDRRAGYVAASILLPYIAARVLPGLRAQARKLLQRRLETLRKRDGQSATGREARIWSYLEQHLSSFTSGAPFQAVILALFYFSGTYYQLSKRLLSLRYVFTRTVPDTPDRAGYELLGVLLVVQLAVQSYSHIRSTITESTARERAAFGSSDDISLNHDGAYNQDNNLLLSTGAPGSKTKVDIFAATHTPAATVPRLQLTDDKTMGYIKGGQQRKCTLCLEEMKDPSATQCGHVFCWECIGDWYSSDEQILICSTTSK

SEQ ID NO: 1454 - protein, 302 aa, Glycine max
MSNISMVEAKLPPGFRFHPRDEELVCDYLMKKVQHNDSLLLIDVDLNKCEPWDIPETACVGGKEWYFYTQRDRKYATGLRTNRATASGYWKATGKDRPILRKGTHVGMRKTLVFYQGRAPKGRKTEWVMHEFRIEGPHGPPKISSSKEDWVLCRVFYKNSEVLAKPSMGSCYEDTGSSTLPALMDSYISFDQTQTHADEFEQVPCFSIFSQNQTNPIFNHMTTMEPKFPLNHATTTYGGAPNLGYCLDPLSCDRKMLKAVLNQITKMERNPLNQSLKGSPSLGEGSSESYLSEVGMPHVWNY

SEQ ID NO: 1455 - protein, 189 aa, Oryza sativa (japonica cultivar-group)
MARMLLEAAASGSVEDSLNSDLVVILAGLLCALICVLGLGLVARCACTRRWARAAGGGTAAGGGGGGAAAANKGVKKEVLRSLPTVTYVSDGGGGEAEECAICLVEFEDGQAVRVLPQCDHRFHAACIDTWLRAHSSCPSCRRVLVAAEMPPGERCGRCGARSGGRGIGALLLNYWKAPACDAEGPELA

SEQ ID NO: 1456 - protein, 199 aa, Oryza sativa (japonica cultivar-group)
MEQGGGAADGGDLISLCLMALAAAARGESTALALALAPPPPELHFRCSLCGKAFASYQALGGHKASHRKPSAAAAAPPAHRDVVVAAAPASSGRVAADADAASEADGRRRRHVCSLCRRGFATGQALGGHKRFHYLHGPSVSATVSSAATAASVGAAFDLNVAPIKEIAGEQRRCGEEADDDDEAESPSPAKKPRRRPG

SEQ ID NO: 1457 - protein, 227 aa, Zea mays
MARGKVQLRRVENPVHRQVTFCKRRAGLLKKARELSVLCDASVGIIVFSAHGKLYNLATTGTMEELIERYKAASAGEATTDGCGRHNRMDPKHETTVLQQEINLLQKGLRYIYGNRANEHMNVDELNALERYLEIWMYNTRSAKMQIMAQEIQTLKSKACMLKAANEILQEKIVEQSSLLDVGMVVADQQNGRFSTVPLVEEVISSNPLTILSGYSSCRGSEMGYSF

SEQ ID NO: 1458 - protein, 297 aa, Zea mays
MAVDEASSSGGGEEGCGSWTREQEKAFENAVATMGGEEDGDARWEKLAEAVEGKTPEEVRRHYELLVEDVDGIESGRVPLPAYAADGAAEEGGGGGKKGSGGGGTHGDKGSAKSAEQERRKGIAWTEDEHRLFLLGLEKYGKGDWRSISRNFVISRTPTQVASHAQKYFIRLNSMNRERRRSSIHDITSVNNGDPSTAQGPITGQTNGQAANPGKPSKQSPQPANTPPGVDAYGTTIGQPVGGPLVSAVGTPVTLPVSAPPHLAYGMRAPVPGAVVPGAPVNIAPMPYPMPPPPSHG

SEQ ID NO: 1459 - protein, 233 aa, Dendrobium thyrsiflorum
MEPKEKMGRGKIEIKRIENTTNRQVTFCKRRNGLLKKAYELSVLCDAEVALIIFSSRGRLYEYANNSVKGTIDRYKKANSDNSNSGSISEANSQYYQQEATKLRQQITNLQNSNRNLLGDALTTMSLRDLKQLETRLEKGINKIRSKKNELLHAEIDYMQKREMDLQTDNMYLRNKIADNERAQQHQHMNILPSTSAEYEVMPPFDSRSFLQVNLLDPNDHYAHQQQTALQLG

SEQ ID NO: 1460 - protein, 234 aa, Dendrobium thyrsiflorum
MGRGKIEIKRIENTTNRQVTFCKRRNGLLKKAYELSVLCDAEIALIVFSTRGRLYEYSNHSIKATIEKYKKACADSSNPGSLVEVNSQQYYQQESAKLRHQIQLLQNSNRHLMGEGLSSLTLKELKQLENRLERGITRVRSKKHELLFAEIEYMQKREVELQNDNMYLRAKINDNERAEQANIVQAGADFDTLPNFDSRNYYQVNILETAAHYSHHQDQTALHLGYETKADHSA

SEQ ID NO: 1461 - protein, 519 aa, Yarrowia lipolytica CLIB122
MTDTDESSQFDEESYPSDGSLDYDSEDQDMEDSQFWEEDEEMEPSSDNFGAMSHSEAIQVDHTALAASSQRVLEPEDLLKGQAADVARVSELTALEPWRAELLLWKDDWKVDHVITKYLEQGEKVLREAGMLSDDPVEFVISKPRPDFMCFLCCDEDKATSFKLACGHECCTECYSHYLRGKIQENGSLDITCPMNCKEIVPKPAVMLLTDKKLQAKYQSTLCTRYVRAHNDMKWCPAPDCGKAVKANISVTDESVIPIAECNCHQQFCLACNIDEDHLPCPCKVAARWLEKLRDESETMTWMSVNTKPCPKCTNPIEKNGGCNHINCTQCGNHFCWVCLGDWAKHGSSNYQCNMYSPEQAEEDQKSVNAKREQLDRYMFFYTRYNNHRDSAKLDEKTYKNITKTMETLQKEGKMTWLESRFLPSSFEILRQSRQTLLWTYAFAFFLDAQPEREIFLKNQEDLELHTEGLSELFEYKWDRIPGAKVNFLDKCSYLKSRRQKLVEHVMKGMEERNWKFLN

SEQ ID NO: 1462 - protein, 218 aa, Arabidopsis thaliana
MDPLLIQSPFSGFSPEYSIGSSPESFSSSSSNNYSLPFNENDSEEMFLYGLIEQSTQQTYIDSELQDLPIKSVSSRKSEKSYRGVRRRPWGKFAAEIRDSTRNGIRVWLGTFESAEEAALAYDQAAFSMRGSSAILNFSAERVQESLSEIKCTYEDGCSPVVALKRKHSMRRRMTNKKTKDSDFDHRSVKLDNVVVFEDLGEQYLEELLGSSENSGTW

SEQ ID NO: 1463 - protein, 194 aa, Arabidopsis thaliana
MPTLYKKAGCQFQLTTMGRRKIKMEKVQDTNTKQVTFSKRRLGLFKKASELATLCNAEVGIVVFSPGNKPYSFGKPNFDVIAERFKNEFEEEEEGDSCETSGYSRGNRARQEKKICKRLNSITEEAEAEKKHGEDLHKWLESAEQDKFNKPIEELTLEELKEFEAKIKKISCGIQSNISHMQASSSLMFLSNDN

SEQ ID NO: 1464 - protein, 307 aa, Zea mays
MKERQRWRPEEDAVLRAYVRQYGPREWHLVSQRMNVALDRDAKSCLERWKNYLRPGIKKGSLTEEEQRLVIRLQAKHGNKWKKIAAEVPGRTAKRLGKWWEVFKEKQQRELRDSRRPPPEPSPDERGRYEWLLENFAEKLVGERPQQAAAAPSPLLMAAPVLPPWLSSNAGPAAAAAAAVAHPPPRPPSPSVTLSLASAAVAPGPPAPSPWMPDRAAADQAPYGFPSPPQHGGAAPPGMAVVDGQALAELAECCRELEEGRRAWATHRREAAWRLKRVEQQLEMEREMRRREVWEEFEAKMRTMRLE

SEQ ID NO: 1465 - protein, 136 aa, Capsicum annuum
MDTNKWEGKRTINEAEEEEDEHESVEEDNKRKRVLSPSGRKLSGGGSSHPSCQVEQCTADMANAKPYHRRHKVCEFHSKSSIVLISGLQQRFCQQCSRFHLLAEFDEAKRSCRRRLAGHNERRRKISYDSQGESLN

SEQ ID NO: 1466 - protein, 207 aa, Eucalyptus grandis
MARGKTKMRRIENATSRQVTFSKRRKGLLKKAYELSVLCEAEVAVIIFSQNGKLYEFSSNSEIRKTIDRYRRSTNVDTYQLCGRYILHLKQETMDMERKIELLEVSQQKLSGQCLGSCSINEIQEIGDQLEQSLSSIRKRKAQLFNDQIQQLQAKERHLKEENAKLLAKFLANPWQSTAHPRAAAINSRSSRGTDVETGLFIGLPES

SEQ ID NO: 1467 - protein, 496 aa, Medicago truncatula
MMEANAMFSTITPSGLLGVVDNIPLHQQQQQQKQQNLPNQQQQNPHQLHHSQVVSYAPQHHDTDTNQHHHHSMKHGFPPFSSSKNKQQQQSSQMSDEDEPNFPAEESSGGDPKRKISPWQRMKWTDTMVRLLIMAVYYIGDEAGSEGTDPNKKKSSGLLQKKGKWKSVSRAMMEKGFYVSPQQCEDKFNDLNKRYKRVNDILGKGTACRVVENQGLLDSMDLSPKMKDEVRKLLNSKHLFFREMCAYHNSCGHGGVATSNVQHQVEGGSGTTTPPQNQPQQQHQHQHQQQNQQHCFHSSENGVGSLGVSRGEGLRMLKIGSGYVEEEDDEDEEDESEDFSDEGEDESGEGCSKGHINDQDEEENDGKPSRKRARKGGFSFPRSSSSTQLVNQMNNEISGVFQDGGKSTWEKKQWIRNRIMQLEEQKIGYESQAFQLEKQRLKWARYSSKKEREMERAKLENERRRLENERMVLLIRKKELELMHIQQQQQQQHSST

SEQ ID NO: 1468 - protein, 235 aa, Oryza sativa (indica cultivar-group)
MGRGRVELKKIENPTNRQVTFSKRRMGLLKKANELAILCDAQIGVIVFSGTGKMYEYSSPPWRIANIFDRYLKAPSTRFEEMDVQQRIIQEMTRMKDENNRLRIIMRQYMGDDLASLTLQDVSNLEQQIELSLYKVRLRKQQQLLDQQLLEMHSREMQIPGDQSNYLCHMAQAPLMANPKPFPLWDVGGSSQMYNQDAESSMTALQLSPQLEYKLQPLQPNLQEEANLHGYVLRL

SEQ ID NO: 1469 - protein, 291 aa, Arabidopsis thaliana
MGSSSKNIEQAQDSYLEWMSLQSQRIPELKQLLAQRRSHGDEDNDNKLRKLTGKIIGDFKNYAAKRADLAHRCSSNYYAPTWNSPLENALIWMGGCRPSSFFRLVYALCGSQTEIRVTQFLRNIDGYESSGGGGGASLSDLSAEQLAKINVLHVKIIDEEEKMTKKVSSLQEDAADIPIATVAYEMENVGEPNVVVDQALDKQEEAMARLLVEADNLRVDTLAKILGILSPVQGADFLLAGKKLHLSMHEWGTMRDRRRRDCMVDTEVIFDACTTVNSGPRPTETTNNERN

SEQ ID NO: 1470 - protein, 232 aa, Medicago truncatula
MEWNGNTRSFVPQPESSLSFLYNYNQCSYQGMMEVKHQDWTDTMFPEMEKMMKYGNQEKKKRLTSEQMESLESSFQEEIKLDPQRKMKLSKELGLQPRQIAIWFQNRRARWKTKQLEHLYDSLRHQFEVVSKEKQQLQDEVMKLKAMLKEQGNSCGRMQGYYTEMSVEETETVESTSEAALRCSNREVKGKIHQQLNIDEGNCSFNLEDYNINNNVPLLPYWPAAVPYNYHP

SEQ ID NO: 1471 - protein, 120 aa, Brassica napus
  misc_feature (51)..(51): Xaa can be any naturally occurring amino acid
  misc_feature (82)..(82): Xaa can be any naturally occurring amino acid
MGRCPTRKVKKRRLSHKTARRDKFEVKGDDLVYTELRKPETETKPLELNEXDLPGMGQFYCLHCDRYFSKASVRDDHFKTKXKHKKRMKIMNGPAPHSQLDADLAAGMGMPDNGPKLMAA

SEQ ID NO: 1472 - protein, 272 aa, Arabidopsis thaliana
MESNSFFFDPSASHGNSMFFLGNLNPVVQGGGARSMMNMEETSKRRPFFSSPEDLYDDDFYDDQLPEKKRRLTTEQVHLLEKSFETENKLEPERKTQLAKKLGLQPRQVAVWFQNRRARWKTKQLERDYDLLKSTYDQLLSNYDSIVMDNDKLRSEVTSLTEKLQGKQETANEPPGQVPEPNQLDPVYINAAAIKTEDRLSSGSVGSAVLDDDAPQLLDSCDSYFPSIVPIQDNSNASDHDNDRSCFADVFVPTTSPSHDHHGESLAFWGWP

SEQ ID NO: 1473 - protein, 286 aa, Capsicum annuum
MVDNIDDIVAHINWDDVDHIFHNVLHDDLFTVHDPDPSAPNFQDIEQLLMNDDDVEDQADTQFAAEFLSDVLVDSPAQSHQSPSAEEEAFGFPDSKVSSGSEDDKDKVSHSPSDADELNNDDPIDKKRKRQLRNRDAAVRSRERRKLYVRDLELKSKYFESECKRLGFVLQCCLAENQALRFSLQNSSANGVSMTKQESAVLLLESLLLGSLLWFLGISCLLILPSQTWSIPEENQGSRNPGLLVPIKRGKKTSRSLAFLSFMMGKRCKASRSRMKFNPHSLGIVM

SEQ ID NO: 1474 - protein, 155 aa, Glycine max
  misc_feature (126)..(126): Xaa can be any naturally occurring amino acid
PSWNDPIFTSSGEAGSFLRGIDVNRLPSVVDCEEEAGVSSPNSTVSSVSGKRSERETNGEENDTDRACSRGIISDEEDAETSRKKLRLSKDQSIVLEESFKEHNTLNPKQKLALAKQLGLRARQVXRTKLKQTEVDCEFLKRCCENLTEENRRLQ

SEQ ID NO: 1475 - protein, 150 aa, Brassica napus
MEMMSSSSSSTTQVVSLREMGMYEPFQQLSGWENAFNTIGSSNQNNNNNNNNPSSSTVPEVDARADADDNNKANYTSMYNNSVEAEPSSNNDQDDDQINDKMKRRLAQNREAARKSRLRKKAHVQQLERSRLKLSQLEQELARARQQGLC

SEQ ID NO: 1476 - protein, 321 aa, Oryza sativa (japonica cultivar-group)
MGDEEDLELVLGVRATRRDEQDDQTTCTQSSEEAMEGEEDETRPHGEAPVESLSFPLFVSSAETGSANSEMCTRGFDVNTRPADGGAEAGRPSSPSSMQEASTRQQVADQEAADDEDNGGGGARKKLRLSKEQSSFLEDSFKEHSTLTPKQKSDLANRLNLRPRQVEVWFQNRRARTKLKQTEVDCEHLKRCCERLTRENRRLQREVAELRGTLRTTTSSYPPLYGLHHLPAAAGTVFRVCPSCEHSKVVAAAASESFSPRVFAGGGAPAAITAAAAVPSPGAGSPPSSSAALFGAKRPHLAPLPPPSSRRLLRRQPSATS

SEQ ID NO: 1477 - protein, 138 aa, Triticum aestivum
MEDNRRTRSQFLTPLYLDEDAALEDNAAMPSHNMWNKRQRVAPLICLSPEREEGSSLQSNNAMQVSQEPAKVVVPKEPNFTCPVCLNKLVEPSTTKCGHIFCAECIKQAIQFQKKCPTCRKALRKNNFHRIYLPNSDG

SEQ ID NO: 1478 - protein, 691 aa, Daucus carota
MGGYNDGPLAGEWMPPSPSPRSFFSSMLGDDVSFRSITDLSSDNRGGTLFSPPADNNVGANSDEKNDGRRSADEVQAINQNSPSEQKLSLRKGLSERMAARAGFSAPRVDTRKLNLLICHRASGMQSPYLTIPPGLSPTTLLDSPVFLSNSLVQPSPTTGKFPFASGGNGRSSIFMMEGTDKRKDDFFDNINTSSFAFKPAAESSPSLFLGGGASSNVPHQSLPGMEISGQPDNSYLPQSVEPEKELSPPLNEQHDVDADQRGDTNVGNAPSEDGYNWRKYGQKQVKGSEYPRSYYKCTHQNCPVKKKVERSHRGHITEIIYKGAHNHPKPPPNRRSGIGSSNALSEMQLDMAEQNGSAVDVDPALTVMKKSGASYWRHDNFEVTSSAAMGPEYGNNPSTLQAAGGAQLESGDQVDRSTTFSNDEDDERGTHGSVSIDYDGEEDESESKRRKVEAYATEVSGATRAIREPRVVVQTTSEVDILDDGYRWRKYGQKVVKGNPNPRSYYKCTNAGCTVRKHVERASHDLKSVITTYEGKHNHDVPAARNSSHANSGVTNPVPSSAGASQSHAHRSEVAQLQNNMARFERPQSLGSFGLPGRQQMGPSHGFGFGMNQPSLANLGMAGLVPNESKMPAMPNHPFFGQPRPMNDMDFMLPKGEPKQEPMSEPSLNNSNGTSVYQQYMSRYSLGPQM

SEQ ID NO: 1479 - protein, 215 aa, Beta vulgaris
MGRRKIEMKRIEDKSSRQVTFSKRRSGLIKKARELSILCDVDVAVLVFSNRGRLYEFVNSSSSSSLSQILKRYQDSTAADGKASIAAVETEQSSPSSCAEVQTCGELVKSVERYLEGPELENLRLEDFMRLERQLADALVQTRTRKTQLMLESIGTLSEQEKLLKQENEQLKDEVANLIGIPKSRNHKDLGVNNLMEVDADRQYSQPLRTLPLLR

SEQ ID NO: 1480 - protein, 215 aa, Triticum aestivum
  misc_feature (203)..(203): Xaa can be any naturally occurring amino acid
GLLRLVFGEQLRKGMGTVGAWRRAQDGSVTTGEAVVDLDRSPIAGDGGGGGQHEAPNTAGTRASPIDVEALGDEGRSRAKIKRRVVVVDLEADADQEGCGDARTTFNRLSGNKRRKVPPVISLSPDREERSSNQRNSTVRVSRPSANAAPNEPTFTCPVCLNKMELPSATSCGHVFCEKCIKAAIKAQKKCPTCRKRLGPKSXRRVYLPATADQV

SEQ ID NO: 1481 - protein, 303 aa, Oryza sativa (japonica cultivar-group)
MLIHGEGSSSSAAAAGGKIKGSWSPEEDEQLRGAVARHGPRNWTAISEEVPGRSGKSCRLRWCNQLSPGVHRRPFTPDEDALIVAAHAKYGNKWATIARLLDGRTDNSVKNHWNSSLRRNRRAAAAAAAAAASVSYQSMDLTEEADNDDEGTSDDSVAIPAQSSPAAVVAGVPVLPPPPPPAKRLCVAPPTGVEHRAPPPDPPTSLSLSPPGAAAAAISASTVVGGSSAARAEEEAVAREKARMEQDPWLMAMMRQMITEEVQRQVSVVYSLVASSAAMAAQTGNAGGVGRKGPDGRPSNGQD

SEQ ID NO: 1482 - protein, 214 aa, Beta vulgaris
MGRRKIEMKRIEDKSSRQVTFSKRRSGLIKKARELSILCDVDVAVLVFSNRGRLYEFVNSSSSSSLSQILKRYQDSTAADGKASIAAVETESSPSSCAEVQTCGELVKSVERYLEGPELENLRLEDFMRLERQLADALVQTRTRKTQLMLESIGTLSEQEKLLKQENEQLKDEVANLIGIPKSRNHKDLGVNNLMEVDADRQYSQPLRTLPLLR

SEQ ID NO: 1483 - protein, 291 aa, Arabidopsis thaliana
MPTLYKKAGCQFQLTTMSGEGNLGKDHEEENEAPLPGFRFHPTDEELLGYYLRRKVENKTIKLELIKQIDIYKYDPWDLPRVSSVGEKEWYFFCMRGRKYRNSVRPNRVTGSGFWKATGIDKPVYSNLDCVGLKKSLVYYLGSAGKGTKTDWMMHEFRLPSTTKTDSPAQQAEVWTLCRIFKRVTSQRNPTILPPNRKPVITLTDTCSKTSSLDSDHTSHRTVDSMSHEPPLPQPQNPYWNQHIVGFNQPTYTGNDNNLLMSFWNGNGGDFIGDSASWDELRSVIDGNTKP

SEQ ID NO: 1484 - protein, 297 aa, Glycine max
MDRIKGPWSPEEDEALQKLVEKHGPRNWSLISKSIPGRSGKSCRLRWCNQLSPQVEHRAFTAEEDDTIIRAHARFGNKWATIARLLHGRTDNAIKNHWNSTLKRKCSSTMIDDNTQPLKRSVSAGAAIPVSTGLYMNPPTPGSPSGSDVSESSLPVASSSHVFRPVPRTVKVLPPVETTSSSNDPPTSLSLSLPGVGVVDSSEVSNRTTEPIHFTPPMPHRSNTMPLLPMMTSVSATVMAPFNFSAEFRSVMQEMIRKEVRSYIELHNQNGMCFQAAVNDGFRNASVKRIGISRVDS

SEQ ID NO: 1485 - protein, 154 aa, Glycine max
LSLHTSALQGSFPLGAETLAAAADDREQAQMGGKCPHRKVKKRRLNCKQVRRGKFLVKADDAVYDELVKLADQGKDSEGKALPVDEDLPGMGQFYCLHCDRYFADETVKEDHYRSKRHKKRVKQLSGPAPHTQIDADLAGGMGMPDNGLKLMSS

SEQ ID NO: 1486 - protein, 227 aa, Momordica charantia
MGRGKIEIKRIENTTNRQVTFCKRRNGLLKKAYELSVLCDAEVALIVFSSRGRLYEYSNNSIKTTIGRYKKACSDSSATSSVTELNTQYYQQESAKLRQQIQMLQNSNSNLVRHLMGDSLSALTVKELKQLENRLERGITRIRSKKHEMLLAEIEYLQKREIELENENVCIRTKIAEVERLQQANMVSGQELNAIQALASRNFFTPNMMEGGAVTFSHQDKKMLHLG

SEQ ID NO: 1487 - protein, 299 aa, Glycine max
MGAPKQKWTAEEEQALKAGVVKHGVGKWRTILKDPEFSGVLYLRSNVDLKDKWRNLSVMANGWSSREKSRLSVRRVHQVPRQDENSMAITAVAPSDEEIVDVKPLQVSRDMVHIPGPKRSNLSLDKLIMEAITCLKENGGSNKTAIAAFIEDQYWALPGLKSMLSAKLKFLTASGKLIKVNRKYRIAPIAAYSDRRRNSSVLYLEGRQKASMKIDRDETNILTRSQIDLELEKIRSMTPQEAAAFAARAVAEAEAAIAEAEEAAKEAEAAEADAEAAQAFADATTKSAKGRKSPKRIHA

SEQ ID NO: 1488 - protein, 184 aa, Solanum lycopersicum
MASFGGTTQKCKACEKTVYLVDQLTADNKVYHKACFRCHHCKGTLKLSNYNSFEGVLYCRPHFDQLFKMTGSLDKSFEGAPKTVRERSADQGSNSKVSSLFGGTQDKCVACKKTVYPLEKTRAEQVAVDGTSYHRPCFKCSHGGCVISPSNYVAHEHRLYCRHHHTQLFKERGNFSQMEDHEKN

SEQ ID NO: 1489 - protein, 283 aa, Triticum aestivum
  misc_feature (251)..(251): Xaa can be any naturally occurring amino acid
MQMDSYYFHDDAHLFAGCGVPGSPDLPFADLIASLSEPLPAVVESQSAFREYRGVGLELPGTARGGTGNGINIHRRMMGVLGRMGPAAEEEERPQHQQQQAAGAVESSRGFRHMMRERQRREKLSQSYADLYAMVSSRSKQDKNSIVQSAAVYIHELKVAKEQLQRRNDELKAKILGHDEQQQCVKVQFEVDEPSSSVDSMIGALTRLKSMNVKTRGIHSILSGQRLTTEMNVETTIAACEVEKAVEEALXKEVERNQLPDSEAPFPGSRTAWPQTSHVQNVF

SEQ ID NO: 1490 - protein, 147 aa, Brassica napus
MGRTPCCDKKGLKKGPWTAEEDEILVEYIKKNSHGSWRTLPKNAGLLRCGKSCRLRWTNYLRPDIKRGPFTPEEEKLVVQLHAILGNRWAAIAAQLPGRTDNEIKNLWNTHLKKRLLSMGLDPKTHEPLPSFGLAIQAPASPTTRHM

SEQ ID NO: 1491 - protein, 309 aa, Glycine max
MKWESITLSSPTPCTPNSNTNWLVMEDNNSRSTKWTSEENKLFENALAVHDKDTPDRWHRVAEMIPGKTVVDVIRQYKELEVDVSNIEAGLIPVPGYSSTAISPFTLDWVNTPGYDGFKGCGKRPSSVRPIEHERKKGVPWTEEEHKLFLLGLKKYGKGDWRNISRNFVITRTPTQVASHAQKYFIRQLSGGKDKRRASIHDITTVNLTETITTSCSEDTNRSTSPHVLSQPQQQNSTPTTPRTHFQWTNQSNTGVAMTLNPAHERVFMSPYGANSFGVKIEGQNLHESSYLGPQTQNMVFQMQQSSQH

SEQ ID NO: 1492 - protein, 229 aa, Triticum aestivum
DPIPPTTPRRATQILPLPARGSAAATTMSAAPPSSTAAETTATAPAPLPRLPIPNPLPLFAERGGGARLRHHAYSRKQKSLGLLCSNFVALYDWDGVESIGLDDASRRLGVERRRIYDIVNVLESVGILARKAKNRYSWIGFGGVPMALRELKERALREKSGLAPLPAEELSAANMSDDEDDDKLGDPEAEREGEKLNQTVDNPSDMPDAPPCRLRSDHRKEMSLGLLT

SEQ ID NO: 1493 - protein, 422 aa, Zea mays
  misc_feature (140)..(140): Xaa can be any naturally occurring amino acid
  misc_feature (183)..(183): Xaa can be any naturally occurring amino acid
MAGGGFVEDMMREQSLLEATCGDLFDHIDDLLDFPNEDSAAAVLLLDAPAPGSPLSARIIDVGRAGNALAPPAAPAQHDASASAFFAAAGNDVFDTKDVVGAHIGSCDDIDMDMAQLEWLSGLFDDASIPHEPVFPGATXAAPAPIMKSSALAAGALLPQDKMEDALLFRSSSPISVLEHGQXGSGSASATGSASSSSSSASSSSESFSGSGSGSGGGHVWSAPVSPRPAPPPVLVIPARARSKRSRSSAFTGAAARAGAETPTILVPTPMYSSGSAHSDPESIAESSPHPAPPMKKKKKAKKPAPPAPAASSDDNDGDADYEEGGELAEPQGGAVRRCTHCQIEKTPQWRAGPLGPKTLCNACGVRYKSGRLFPEYRPAASPTFVPSIHSNSHKRVVEMRQKAVRSGDPSCDLLHFIRRRD

SEQ ID NO: 1494 - protein, 132 aa, Triticum aestivum
  misc_feature (72)..(72): Xaa can be any naturally occurring amino acid
SLHTSPLQGSFPLGAETLAAAADHREQAQMGGKCPHRKVKKRRLNCKQVRRGKFLVKADDAVYDELVKLADXGKDSEGKALPVDEDLPGMGQFYCLHCDALIESRLTVKEDHYRSKRHKKRVKQLSGPAPHT

SEQ ID NO: 1495 - protein, 211 aa, Capsicum annuum
MALKSKVSSNGSENAKVNGVKEVHYRGVRKRPWGRYAAEIRDPGKKSRVWLGTFDTAEEAAKAYDAAARDFRGPKAKTNFPSPFPLETLNQSPSNSSTLESSSGETGVHAPMEVDLTRRLGAVAPVFHQQPTVAVLPNGQPVLLFDSLWRPGVVVDKAQLSYQVAPMAIEFTGAAGGVSSVSDSSSVVEENQYVGKKGLDLDLNLAPPMEI

SEQ ID NO: 1496 - protein, 236 aa, Oryza sativa (japonica cultivar-group)
MASPEGSTWVFDCPLMDDLAAAAGFDAAPAGGFYWTTPAPPQAALQPPPPQQQPVAPATAAPNACPRSESGTRPSSKACREKVRRDKLNERFLELGAVLEPGKTPKMDKSSILNDAIRVMAELRSEAQKLKESNESLQEKIKELKAEKNELRDEKQKLKAEKESLEQQIKFLNARPSFVPHPPVIPASAFTAPQGQAAGQKLMMPVIGYPGFPMWQFMPPSDVDTTDDTKSCPPVA

SEQ ID NO: 1497 - protein, 191 aa, Solanum lycopersicum
GDSMSTWTRDDDKLFEHGLVLYPENSADRWQLIADHVPGKTADDIMAHYDDLVHDVYEIDSGRIDLPSYTDDPVELEGDCQITSGSNKKSNEIERKKGTPWTEDEHRLFLIGLDKYGKGDWRSISRNVVVSRTPTQVASHAQKYFIRQQAMKKERKRSSIHDITTAVDTNPVPPQSSFQNQSGSQNFNFAM

SEQ ID NO: 1498 - protein, 348 aa, Brassica rapa subsp. pekinensis
MTRRCSHCNHYGHNSRTCPSRGVMLFGVRLTGGSIRKSASMGNLLSHGHGSGSPGDVPDHVAGDGYTSEGFVAGSSSSRERKKGAIWTEEEHRMYLLGLEKLGKGDWRGISRKYVRTRTPTQVASHAQKHFMRLSDVSRRKRRSSLFDMIPHEVGVTPMDQQEPEAENTPVETLMRSSDSVHQTVASSSRKAPSILEIDECESMDSTNSTTGEPTSIAAAASSSSSILEETTQPQLQSFPILYPAYFSPYYPFPYPIWPAGYVPEPTKKEETHEILRPTAVHSKAPINVDELLGMSKLSLGESKKKNGESDQSLSLKLGGGSETRQSPFHPNLSPPDSSDIANVIHAA

SEQ ID NO: 1499 - protein, 334 aa, Zea mays
  misc_feature (55)..(55): Xaa can be any naturally occurring amino acid
  misc_feature (88)..(88): Xaa can be any naturally occurring amino acid
MFGQSFAEDLDCGNFFDNMDDLLDFPGGDIDVGFGIGDSDSFPNIWTTHQDTWPXAASDPLFASNTNSDSSPELHVPFEDIVKVERPXAFVEESLVEKKEDSFFTNTDSSSSHSQFRSSSPVSVLESSSSSSHTTNTTSLVLPGKHGRPRTKRPRPQVQEKDKVNDNVFGADSRLIIRIPKQFLSDHSKMITKKKKKKAKVVSSSSWSEIDLETNGNNNVDSCSSEQNPVRKCMHCEVTKTPQWRLGPMGPKTLCNACDVRYKSGRLFPEYRPAASPTFTPALHSNSHKKVAEMRNKRCSNGSYTNEENDLHDLVLNNAYIGIGVGKSQRVEKF

SEQ ID NO: 1500 - protein, 196 aa, Brassica napus
  misc_feature (35)..(35): Xaa can be any naturally occurring amino acid
  misc_feature (120)..(120): Xaa can be any naturally occurring amino acid
  misc_feature (151)..(151): Xaa can be any naturally occurring amino acid
  misc_feature (164)..(164): Xaa can be any naturally occurring amino acid
  misc_feature (177)..(177): Xaa can be any naturally occurring amino acid
IVWKSLFYSLDTIKSSFYEVKKLLNSKHLFFKERXMYAYHNRCSHLDNCIRLRVSIVWSSITVLRGGVRKLERIAGSEEEEESEMAEGSESETEETSKKQMRVEGVSAEVKKMREEASVXDPVKIMCENKELMRRKALELKERKIGYEWRXVEMEKQRVRWMRXVARKRKQMDKVNXKLENLRGRVEMERMVLIMR

SEQ ID NO: 1501 - protein, 402 aa, Avena fatua
QQQPWGYQQQPGAMDAGANAASFSAPAVQATSSEMAPSGGVYRQTHSQRRSSDDGYNWRKYGQKQVKGSENPRSYYKCTFPNCPTKKKVETSIEGQITEIVYKGTHNHAKPLSTRRGSGGGGGGAAQVLQSGGGGDASEHSFGAMSGAPVSTPENSSASFGDDEIGASSPRAGNVGGDDLDDDEPDSKKWRKDGDGEGSNSMAGNRTVREPRVVVQTMSDIDILDDGYRWRKYGQKVVKGNPNPRSYYKCTTVGCPVRKHVERASHDLRAVITTYEGKHNHDVPAARGSAALYRPAPRAAADSAMSTSQQYTANQQQPSAMTYQTSAAAGTQQYAPRPDGFGSQNQGSFGFNGSFGFSAGFDNPTGSYMSQHQQQQRQNDAMQASGAKEEPREDMFFQHSQF

SEQ ID NO: 1502 - protein, 441 aa, Oryza sativa (indica cultivar-group)
MAAAGNSFLNQELVKVADGVSDWHLPSSSHGGTCHTNTRGAPITVGVPDLGCPVSSIGMATSSSLMPKEGLTTASYNSVVAFPVGATMVPQQQQTQAAGSNDNPGLVKGGWTGEEDEVLRQMVRHHGDRKWAEIAKSLPGRVGKQCRERWTNHLHPDIKKDIWTEEEDRMLIEAHQTYGNSWSAIAKRLPGRSENTVKNHWNATKRSLNSKRRLRKKNSEQTVPGQPSLLENYIRSCQHMLPSETVPPPPAPPAPFDISRYGNSGVIGASPTLPIVQEPGTSTPPGLVMFLDLLNQAIPHPPQPETMDLFNMTPEVSHLNTSGYCLQLDAGGNLYYGRLPAPAPVQPHGISTQELQDTPHLSLYYPLSSFAGSHTDGTVEFDHQLSNPNGGHYGEEAGPSSVAAGGSANGMDDNDVVQMASNQFMMPCEDEGILDLARWIN

SEQ ID NO: 1503 - protein, 210 aa, Eucalyptus occidentalis
MVRGKIQLRRIENTTSRQVTFSKRRNGLLKKAYELSVLCDAEVAVIIFSQKGRPYEFSSNSEIQKTIDRYRRSTYDMDTYKTNLDQCILHLKQETTDMERKIELLEVSLRKLSGECLGSCSIDEIQMIGDQLERSLSSIRARKAQLFDDQIQHLQAKERSLKEENAKLLAKCLANPGQSTAHPRAAALHSRSSRSTDVETRLFIGLPELN

SEQ ID NO: 1504 - protein, 827 aa, Arabidopsis thaliana
MGKFHSNPNIQIELKDLTELEVGDSEAKQEVMEFLDYWGLINFHPFPPTDTGSTASDHDDLGDKESLLNSLYRFQVDEACPPLVHKPRFTAQATPSGLFPDPMAADELLKQEGPAVEYHCNSCSADCSRKRYHCPKQADFDLCTECFNSGKFSSDMSSSDFILMEPAEAPGVGSGKWTDQETLLLLEALEIFKENWNEIAEHVATKTKAQCMLHFLQMPIEDAFLDQIDYKDPISKDTTDLAVSKDDNSVLKDAPEEAENKKRVDEDETMKEVPEPEDGNEEKVSQESSKPGDASEETNEMEAEQKTPKLETAIEERCKDEADENIALKALTEAFEDVGHSSTPEASFSFADLGNPVMGLAAFLVRLAGSDVATASARASIKSLHSNSGMLLATRHCYILEDPPDNKKDPTKSKSADAEGNDDNSHKDDQPEEKSKKAEEVSLNSDDREMPDTDTGKETQDSVSEEKQPGSRTENSTTKLDAVQEKRSSKPVTTDNSEKPVDIICPSQDKCSGKELQEPLKDGNKLSSENKDASQSTVSQSAADASQPEASRDVEMKDTLQSEKDPEDVVKTVGEKVQLAKEEGANDVLSTPDKSVSQQPIGSASAPENGTAGSLFLSLSDTLITLPTLHDSFISYRFVIEMLFAGGNPNIEGKKEKDICEGTKDKYNIEKLKRAAISAISAAAVKAKNLAKQEEDQIRQLSGSLIEKQQLHKLEAKLSIFNEAESLTMRVREQLERSRQRLYHERAQIIAARLGVPPSMSSKASLPTNRIAANFANVAQRPPMGMAFPRPPMPRPPGFPVPGSFVAATTMTGSSDPSPGSDNVSSV

SEQ ID NO: 1505 - protein, 595 aa, Oryza sativa (japonica cultivar-group)
MAEQPRINSALVSVIRMAKVSKNANSAVSAAAYHYIRNDDRPDKAFTTERAKRAGKANASSGQIFVTIPPDHFGPILAENDPKRSIGVLVGDTWEDRLECRQWGAHFPHVAGIAGQSTHGAQSVALSGGYVDDEDHGEWFLYTGSGGRDLSGNKRTNKEQSSDQKFEKLNAALRISCLKGYPVRVVRSHKEKRSSYAPEAGVRYDGVYRIEKCWRKISVQGKFKVCSDIYGDRPRPLPKVDELKGATDISERKGTPSWDFDEKEGWKWVKPPPISRKPNLSGDPATDKEIRRVARRAQMSVTERLLKEFGCSICKQVMKEPLTTPCAHNFCKLCLVGTYGSQSSMRERSRGGRTLRAQKIVKKCPSCPTDICDFLENPQINREMMDLIESLQRKAVEEGDTKTSSDVSNGAESSGDDGNNEALEKGEDDSSLKDDGSLKDDGKVVKAVVVIKEEDLQPKKSKGEDEKEQGDKKMDSADVVDIAVEKKQATKRASEKAEKKQARKRKGDAVATNDGKRMKTGGDAMETAAEEDAPLSGGTPVKRNSRKSSEVDAKGGGGSPVVSSPRRVTRSNAKASGEADGSPATRTRRATRAEA

SEQ ID NO: 1506 - protein, 197 aa, Brassica napus
QTLLVLQERMKLSPPQPPALNNNDPTAAASAVKSCGGGGGETFSTTRHPVYHGVRKRRWGKWVSEIREPRKKSRIWLGSFPVPEMAAKAYDVAALCLKGRKAQLNFPDEIDDLPRPSTCTARDIQVAAAKAANAVKITKTGDDVADIDDGDDFWSGIELPELIMTGGGWSPELFVAGEDATWVVDGDSYQYQFMACL

SEQ ID NO: 1507 - protein, 248 aa, Helianthus annuus
MSFQNEDSGDISPQRRIGKGKIEIKRIENTTNRQVTFCKRRNGLLKKAYELSVLCDAEVALIVFSSRGRLYEYANNSVTGTIDRYKKSCLDPPSTGSVAEANAQFYQQEATKLRQQIANLQNQNRQFYRNIMGESLADMPGKELKNLESKLEKAINRIRAKKNELLFAEIEYMQKRELELHNSNQFLRARIAENERAQQQHMSLMPGSSGYNDLGPHQSFDGLNDLQTNELQLNNNYSCQDQTPLQLV

SEQ ID NO: 1508 - protein, 124 aa, Triticum aestivum
MPPVLPFDTNGADEMLLLDMISQYHHVQHAAFFSTIAPVKREASQEEDKAAVDVGRAFRGVRKRPWGKNAAEIRDSTRNGVRVRLETFNSPEDAEMEYDEADFAIRGGDDVLNFSGEHVRRSLE

SEQ ID NO: 1509 - protein, 305 aa, Glycine max
MIAVARKDMDRIKGPWSPEEDEALHKLVERHGPRNWSLISRSIPGRSGKSCMLRWCNQLSPQVEHRAFTPEEDETIIRAHARFGNKWATIARLLSGRTDNAIKNHWNSTLKRKCASFMMAGDEAVAVSPRPLKRSFSAGAAVPPPGSPSGSDFSESTAPGVVSVSVSVSPSQVFRPVPVRPVVEYGVVARRRRCRRRGCWTYYLAVAVSSRGGVIGNLYRTSTVPVMPVHTVAAAAPVPLPAPEVGLGALNLNAEFMAVMHEMIRKEVRSYMEQQNGMMCFQGMEMMEGFRNVSVKRIGISRVDS

SEQ ID NO: 1510 - protein, 227 aa, Populus trichocarpa
MGRGKIEIKKIENPTNRQVTYSKRRNGIFKKAQELTVLCDAKVSLIMFSNTNKLNEYISPSTSTKKIYDQYQNALGIDLWGTQYEKMQEHLRKLNDINHKLRQEIRQRRGEGLNDLSIDHLRGLEQHMTEALNGVRGRKYHVIKTQNETYRKKVKNLEERHGNLLMEYEAKLEDRQYGLVDNEAAVALANGASNLYAFRLHHGHNHHHHLPNLHLGDGFGAHELRLP

SEQ ID NO: 1511 - protein, 150 aa, Oryza sativa (japonica cultivar-group)
MASPPRIEVEKLSVEQLKALKEQTDLEVNLLQDSLTKIRSAATRLENASAALHDLSLRPKGKKMLVPLTASLYVPGTLDDSEKVLVDVGTGYFIEKTMTEGKEYCERKINLLKSNFDELVEMATKKKNIADEMGRLLQAKLRQSSPSPSS

SEQ ID NO: 1512 - protein, 233 aa, Glycine max
MFQESSVTRWPTQWTRYHDKLFERALLVVPEDLPDRWEKIADQVPGKSAVEVREHYEALVHDVFEIDSGRVEVPSYVDDSVAMPPSGGAGISTWDNANQISFGSKLKQQGENERKKGTPWTEEEHRLFLIGLSKYGKGDWRSISRNVVVTRTPTQVASHAQRYFLRQNSVKREMKRSCIHDITTVDSNSAPMPIDQTWVPPPGGSPQQSQQYPSSNMHDQMGTLGYSNYGFDM

SEQ ID NO: 1513 - protein, 222 aa, Platanus x acerifolia
IGKLRSNFLGTKFTIYDGQPPHAGATVTKSRSTRLVGLKQVSPRIPAGNYSVAHISYEVNVLGSRGPRRMQCVMDAIPASAIEPGGVAPTQTELPLSNADSFPLLPFFRSKSTRTENHLQPGPLVSQKDGVLVLKNKAPRWHEQLQCWCLNFRGRVTVASVKNFQLVASPGNGPAGQEHEEVILQFGKVGKDLFTMDYQYPISAFQAFAICLSSFDTKIACE

SEQ ID NO: 1514 - protein, 268 aa, Glycine max
  misc_feature (205)..(205): Xaa can be any naturally occurring amino acid
MDRVKGPWSPEEDEALRRLVQAHGPRNWSVISKSVPGRSGKSCRLRWCNQLSPQVAHRPFSPDEDEAIVRAHARFGNKWATIARLLNNGRTDNAVKNHWNSTLKRKKCSAVSDDVTDRPPLKRSASVGPAHLNPGSPSGSDLSDPSLPALSNPSPSAHYRPNLMETASSACDPATSLSLSLPGFGSGSNPVCAPRPVSVSPPSPXPAEPVEQRGKQMFNAEFLRVMQEMIRKEVRSYMSGMEQKNGFRIPTEAIGNAVVKRMGISNIE

SEQ ID NO: 1515 - protein, 402 aa, Ostreococcus tauri
MTCFSAPDRLAAARARLAAPRAPRPPRCLVIIHRRARMSTPLGGFPAAAPPDVVRASQKDDAVASALAERFTDCVARVVGPRALATRASTVRAIGRAFYPGLTILSGTRTLGEEYCDVTCVDAEGRTPSTTSRVTRFLVHAFGDEVIRGARRWVERNVERGVGLRESGARAAARAADGGARVALALAGERVQRVGEEDEISHGERAIDARGGFANAAHLALFYLYGEYYEWSCRASGTRRVFTGAYAGEERPSYAVLGMFVAFQLAVVSFERVRSVVRGANVGGDASAERRARENRVLESDGTPAREVVVDAAPDPPRDVFGNVIDVPGTSAKPSSASISPLVAAKCALCLSQRRAPTATPCGHVFCWRCVAGWASKKPECPLCRAPTTPQSLVPLSNLASA

SEQ ID NO: 1516 - protein, 448 aa, Zea mays
MTEPAPAAAAGEKKAVADTAAAVVAKGKEKEEAAPTLAAGARGRFVAYPARVTEHTDVVADAARFRAALEGLHAHMNTRLKVPIIGGKDLDLHQLYKEVTSRGGIDKLKAENRWREVTASFIFPATATNASFMLKKYYMSLLYHFEQLYFFRVQGWYQQEIDSRTNSSIEVKTEAQAYHKRKRGINASLSDPASSSDNVDVDVIVDGKFEHGYIITVIMGSKSTKAILYNCTEEPALPTSELAVASNNNDLKGGRRRRRRKKKLSTTDPRHPKPNRSGYNFFFQDQHRMLKPQCPGQDRLISKMIGERWNNLSPEDKAVYQERGVQDKERYRTQLAAYRKLTGQPISNAVPIEQRLPLTDVTIDEVDSKVSEGDMLLSNQAYSSSDESDHSGEKTVEDELNTETSPEVSMETTGSLRHPDPCADEDHFELRRRENPKADEKYNAPPDS

SEQ ID NO: 1517 - protein, 321 aa, Glycine max
LRSVHIFVVWMDPSSGQHQQMSSQSLENMLACSKAHQERKPTPQPEQALKCPRCDSTNTKFCYYNNYSLSQPRYFCKSCRRYWTKGGTLRNVPVGGGCRKNKRSSSSSSTSKRVQDQAFTPNVNPLTGLPSLMSYDSNDLTLALARLQKQSCGQLGYDDHDLSMLGNHHTNTPCGDNILGMHHHSSSSSTNPGFLDALRSGFLGTQSNNNMHQNMYYGYGNGDMGEVDNGGGVGVSSSGEMMMMMMMPYNNDQEMSIASTQAVTVTTMKQEICNGREQKVLWGFPWQLNGDTNMGELDSGRASNWNGINSSWHGLLNSPLM

SEQ ID NO: 1518 - protein, 280 aa, Prunus armeniaca
EKSAKRKRKNQYRGIRQRPWGKWAAEIRDPRKGVRVWLGTFNTAEEAARAYDSEARRIRGKKAKVNFPDETPRSSAKRSVKANPQKMQPKTNMNAIQPNLNQNINFVNDPNQDYYNAMGFLDEKPPTNNFGFMSTFPANDVALKSSTPSDAVPLYFGSDQGSNSFDCSDFGWGEQGSKTPEISSVLSSVMEESDDSLFLEDASPTKKLRSNPEDLVPVQDNAGKTLTDELSAFEMKYFQTPYLDGSWDASVDAFLSGDATQDGGNSVDLWCFDDLVGGGF

SEQ ID NO: 1519 - protein, 331 aa, Oryza sativa (japonica cultivar-group)
MFPPFSHLRRRLLAAIPNPNLLLRPSRSLSTSTTPATRAPATPVAVLWDLAASRPPSTLPLYDAAVRLHLAATSFGRVRLSAAFVHPGHRLPAPSPSAAAAAVHLCRVCGRRFRARDTLLRHFDAIHAREHAKRLARIDSSRGDRRVRLAAALSLKLSKYEKAARELTAAADPCSPADDLRRARVAVELSPTPSVSLLERAHEVLDGGSVRCLMLVSARDELAPLLRLAREKGVRSVVVGGESGPARWADVGFSWAEVIAGKARKAAPSVSGKWRDRDVLKRLEWRYDDDDEEVVFEEDGDEDGIDELTRNSKGKPWWKLESDGEDSSACR

SEQ ID NO: 1520 - protein, 271 aa, Medicago truncatula
MESSASSELPPGFRFHPTDEELIVHYLCNQATSKPCPASIIPEVDIYKFDPWELPDKSEFEENEWYFFSPRERKYPNGVRPNRATLSGYWKATGTDKAIKSGSKQIGVKKSLVFYKGRPPKGVKTDWIMHEYRLIGSQKQTSKHIGSMRLDDWVLCRIYKKKHMGKTLQQKEDYSTHQFNDSIITNNDDGELEMMNLTRSCSLTYLLDMNYFGPILSDGSTLDFQINNSNIGIDPYVKPQPVEMTNHYEADSHSSITNQPIFVKQMHNYLA

SEQ ID NO: 1521 - protein, 855 aa, Oryza sativa (japonica cultivar-group)
MQEQAAGSALAMLVTYGETDTSAVSVSPVLESGEPDAAQIDVVAGMQEEAPGSMLAMEVTYREVDAATVSVSPVLESVEPDAAKIDVVARMQEEAPGSKLAMEVMYGETGTAAVSVPLVLESREEGSLQESMQRPSSPTMNIEQESMQRPFSPTIGTETSSPEMAPAGSENCKVSWLPLPPPTPLGESMPSLPVAAAPKVLLVMPEEAVESVPSSEALDVEKPASITQAEPSSPNTPPPGFENFKSSWLPLPTTPPPVETTDVLPDVVVTKAVEAPIEEVSRPLPALEVTNMESDTVLSILPTTVLPTEGTEGLLQQPLLRPPSPVVQSEPCLQNEMAPPGFENFKSSSEPCSAEEIAPPGSDNFKSSSEPCLPEEMAPPGFENFKSSSEPCSQEEMAPPGFENFKSSWPPLPTLPQTVPDAAAADALAATVEEAAGPPPALELEAMDVDMDAIHPPPLPFDSGVESLQKPLPRAPSPIMQEAPCSPDRAPPGFETYKSSQLLLPSPSLAQTTNVRQDQSVTEPVSVIEEAPQLLHSVEVMGVHMDAVPPLLPSSESGADGLSPQQFAQPPPAEKDTTTCLPDMVHSGCDNSEPSQLLSLPAVISPVQTPDGLADVPAIDRVAVALEESPQRPLVSGEMEAGTVPIRSSPLKNISEGSLPQLESESHSPTSQAADSLLDASDSKSVAVASEEMSQLPLASQATTTDLVSTTAMQPQSEGIVDESLQPQHPPSSTAHDSPCLQDSVPLVPPPPSPYLNKEVGQMVCGSCRILLAYFRGAGYVHCTCCQTMNYVLEAHEVGKVHCGHCATLLMYPFGAPAVKCSLCLFVTEIGERNVRRRLSIEQPTRTNSSGLAEA

SEQ ID NO: 1522 - protein, 233 aa, Glycine max
  misc_feature (185)..(185): Xaa can be any naturally occurring amino acid
MALEALQSPTTATPSFSPFEETSLSYLETPWTKGKRSKRSRTEQQLQHPSCTEEEYLALCLIMLARGGAGSVSTAKPAVSDNNSAPLSAAKLSYKCSVCNKAFSSYQALGGHKASHRKLAGENHPTSSAVTTSSASNGGGRTHECSICHKTFSTGQALGGHKRCHYEGGNSAVTASEGVGSTHTXAHRDFDLNLPAFPDFSARFFVDDEVTSPHPSKKSRFNLTIPKIEIPQY

SEQ ID NO: 1523 - protein, 207 aa, Glycine max
  misc_feature (17)..(17): Xaa can be any naturally occurring amino acid
MEATNRSSSSTSSSSDXALPSPTPNKPDRIKGPWSAQEDRILTGLVEQYGPRNWSLISRYIKGRSGKSCRLRWCNQLSPTVEHRPFSTQEDETIIAAHARYGNRWATIARLLPGRTDNAVKNHWNSTLKRRAKGINVNVNDADNEDDPLTALTLAPPGIANATLTEDAVPDHRASPESAAEGFWDMMRDVIAREVREYVSSNFSDNN

SEQ ID NO: 1524 - protein, 299 aa, Oryza sativa (japonica cultivar-group)
MSGMNSLSMVEARLPPGFRFHPRDDELVLDYLERKLLDGGVGGAAAAAAAVTIYGCPVMVDVDLNKCEPWDLPEIACVGGKEWYFYSLRDRKYATGQRTNRATESGYWKATGKDRPISRKGLLVGMRKTLVFYKGRAPKGKKTEWVMHEFRKEGQGDPMKLPLKEDWVLCRVFYKSRTTIAKLPTEGSYNNIDSVATTSLPPLTDNYIAFDQPGSMQNLEGYEQVPCFSNNPSQQPSSSMNVPLTSAMVDQEQNNMGRAIKDVLSQFTKFEGNVKREPFKVIFPRMDLITWLRVASHKW

SEQ ID NO: 1525 - protein, 178 aa, Glycine max
MMAVARKEMDRIKGPWSPEEDEALQKLVERHGPRNWSLISRSIPGRSGKSCRLRWCNQLSPQVEHRAFTPEEDETIIRAHARFGNKWATIARLLSGRTDNAIKNHWNSTLKRKCASFMTADEAAAGGFSPRPLKRSFSAGTAVPPPGSPSGSDVSESSAAPGVVSVSVSSRGGVIGNL

SEQ ID NO: 1526 - protein, 307 aa, Solanum demissum
MAFFPTNFMLQTPHHEDEHQPSTSLNPILPSCSPQDFHGIASFLGKRSMSFSGMDGNNACEENHGEDDLSDDGSQAGEKKRRLNMEQVKTLEKNFELGNKLEPERKMQLARALGLQPRQIAIWFQNRRARWKTKQLEKDYEVLKRQFDAIKAENDALQTQNQKLHAEIMSLKNREQPTESINLNKETEGSCSNRSENSSEIKLDISRTPAIDSPLSNHHPNISSRPFFPPSMIRSNNNNNSNNGVVVPHQLFHINSSSPRQDLKLMDQNTTTTNNNSSVKEESLSNMFCGIDDQTSFWPWLEQQHFN

SEQ ID NO: 1527 - protein, 121 aa, Brassica napus
  misc_feature (2)..(2): Xaa can be any naturally occurring amino acid
  misc_feature (21)..(21): Xaa can be any naturally occurring amino acid
  misc_feature (32)..(32): Xaa can be any naturally occurring amino acid
  misc_feature (44)..(44): Xaa can be any naturally occurring amino acid
MXIQCNVCETAEAAVLCCADXAALCLACDEKXHAANKLAGKHQXVPLSVSSSSKPKCDICQEATGFFFCLQDRALLCRKCDVSIHTVNPHVSAHQRFLLTGIRVGLESTTDTGPSNRPTMT

SEQ ID NO: 1528 - protein, 182 aa, Nicotiana tabacum
FKEKQQREQKENNKVVDPVDEGKYDHILETFAEKIVKERSVPGLLMATSNGGFLHTDAPAPSPQTLLPPWLSNSTATSTVRSQSPSVTLSLSPSTVPPTPTPGIPWLQTDRGPENAPLILSSFPHHGVAPPCGENPFVTELAECCKELDEGHRAWAAHKKEAAWRLRRVELQLESEKTSKVR

SEQ ID NO: 1529 - protein, 233 aa, Arabidopsis thaliana
MPTLYKKAGCQFQLTTMNYTVDDQNMAFISQLYPDVYTQIVQPVGEVKQPKRRRKKTKGSVASADGGNGLFRKRKLTDEQVNMLEMSFGDEHKLESERKDRLAAELGLDPRQVAVWFQNRRARWKNKRLEEEYNKLKNSHDNVVVDKCRLESEVIQLKEQLYDAEREIQRLAERVEGGSSNSPISSSVSVEANETPFFGDYKVGDDGDDYDHLFYPVPENSYIDEAEWMSLYI

SEQ ID NO: 1530 - protein, 405 aa, Triticum turgidum subsp. durum
MGSSDSSSGSAQKAARHQHEPPPPRQRGSAPELPPGFRFHPTDEELVVHYLKKKAAKVPLPVTIIAEVDLYKFDPWELPEKATFGEQEWYFFSPRDRKYPNGARPNRAATSGYWKATGTDKPILASGTGCGLVREKLGVKKALVFYRGKPPKGLKTNWIMHEYRLTDVSGSTTTSRPPPPVTGGSRAAASLRLDDWVLCRIYKKINKAAAGDQQRSTECEDSVEDAVTAYPLYATAGMAGAGAHGSNYASPSLLHHQDSHFLEGLFTADDAGLSAGATSLSHLAAAARASPAPTKQFLAPSSSTPFNWLDASPAGILPQARNFPGFNRSRNVGNMSLSSTADMAGAAGNAVNAMSAFMNPLPVQDGTYHQHHVILGAPLAPEATTGGATSGFQHPVQVSGVNWNP

SEQ ID NO: 1531 - protein, 273 aa, Glycine max
MVSSSGKSREMDRVKGPWSPEEDEALRALVQAHGPRNWSVISKSIPGRFRKSCRLRWCNQLSPQVAHRPFSQEEDEAIIMAHAKFGNKWATIARLLNGRTDNAVKNHWNSTLKRKSSAVSDDDVVTHRQPLKRSNSVGPAHLNPASPSVSDLSDPGLPALSNPSPSAHYMPNLMETASSAPDPATSLSLSLPGFTVPQPVSPPPPPLPLPAETVEERGKQMFNAEFLRVMQEMIKKEVRSYMSGMEEQKNGFRMQTEAIGNAVVKRMGISNIE

SEQ ID NO: 1532 - protein, 298 aa, Brassica napus
MNRGIEVMSPATYLETSPNWLFQENRGTKWTAEENKKFENALAFYDKDTPDRWFKVAAMLPGKTVGDVIKQYRELEEDVSDIEAGLIPIPGYASDSFTLDWGGYDAGSNGFNMNGYYFAAVGGKRGSAARAAEHERKKGVPWTEEEHRQFLMGLKKKKKGRWRNIARNFVTTRTPTQVASHAQKYFIRQVNGGKDKRRSSIHDITTVNIPDSFDAAAADTAITNAPCSPPSLGGSQREGSGQWDGQTINDETAGTFYNPNAFQETLLGMSSTPYMAKLQEQSFLNASQFESYNAYLQM

SEQ ID NO: 1533 - protein, 408 aa, Aegilops tauschii
MGSSDSSSGSAQKAARHQHEPPPPRQRGSAPELPPGFRFHPTDEELVVHYLKKKAAKVPLPVTIIAEVDLYKFDPWELPEKATFGEQEWYFFSPRDRKYPNGARPNRAATSGYWKATGTDKPILASGTGCGLVREKLGVKKALVFYRGKPPKGLKTNWIMHEYRLTDASGSTTTSRPPPPPPVTGGSRAAASLRLDDWVLCRIYKKINKAAAGDQQRSMECEDSVEDAVTAYPLYATAGMAGAGAHGSNYASSSLLHHQDSHFLDGLFTADDAGLSAGATSLSHLAPAARASPAPTKQFLAPSSSTPFNWLEASAAGILPQARNFPGFNRSRNVGNMSLSSTADMAGAAGNAVNAMSAFMNPLPVQDGTYHQHHVILGAPLAPEATAGAATSGFQHHAVQISGVNWNP

SEQ ID NO: 1534 - protein, 396 aa, Triticum turgidum subsp. durum
MGSSDSSSGSAPPRHQPPPPQQGSAPELPPGFRFHPTDEELVVHYLKKKAAKVPLPVTIITEVDLYKFDPWELPEKATFGEQEWYFFSPRDRKYPNGARPNRAATSGYWKATGTDKPILASGCGREKVGVKKALVFYRGKPPKGLKTNWIMHEYRLTDASSSATTSRPPPVTGGSRSASLRLDDWVLCRIYKKINKAAAGDQQRSMECEDSVEDAVTAYPLYATAGMTGAGAHGSNYDSLLHHQDSHEDNFLDGLLTAEDAGLSAGPTSLSHLAAAARASPAPTKQFLAPSSSTPFNWLDASTVGILPQARNFPGFNRSRNVGNMSLSSTADMAVDNGGGNAINTMPPFMNHLPMQDGTYHQQHVILGAPLAPEATAAATSAFQHPVQISGVNWNP

SEQ ID NO: 1535 - protein, 383 aa, Aegilops tauschii
MGSSDSSSGSAPPRHQPPPPQQGSAPELPPGFRFHPTDEELVVHYLKKKAAKVPLPVTIIAEVDLYKFDPWELPEKATFGEQEWYFFSPRDRKYPNGARPNRAATSGYWKATGTDKPIMASGCGREKVGVKKALVFYRGKPPKGLKTNWIMHEYRLTDASSSATTSRPPPVTGGSRAASLRLDDWVLCRIYKKINKAAAGDQQRSMECEDSVEDAVTAYPPYATAGMTGAGAHGSNYDSLLHHQDSHEDNFLDGLLTAEDAGLSAGATSLSHLAAAARASPAPTKQFLAPSSSTPFNWLDASTVGILPQARNFPGFNRSRNVGNMSLSSTADMAVDNGGGNAINAMPPFMNHLPVQDGTYHQQHVILGAPLAPEATAAATSAF

SEQ ID NO: 1536 - protein, 319 aa, Zea mays
MREEEEASWFARGEEQEQQLLRPDELMPLTQTLITPHLAVAFDITTHGAGGTGAAGGAGAGPGAGGPDINGGGASSAAGSSGGGGGGGGDEPARTLKRPRLVWTPQLHKRFVDAVAHLGIKNAVPKTIMQLMSVDGLTRENVASHLQKYRLYLKRMQGLGGGGGGGGGGGAGGSHSSGSGTDAATEHLFATGPVPFLPPGHRAPAAADSYPPFSPMGSGAAHHHHRAPQIGHFHHPAARPLAHYAAAAGPGFDHGFLSRVGPPAGPPGMHHRMVGGGAGMGMGMIAPSSFADEMDLGSRGGGGSGSRRELTLFPTSGDH

SEQ ID NO: 1537 - protein, 316 aa, Oryza sativa (japonica cultivar-group)
MGMGMRRERDAEAELNLPPGFRFHPTDDELVEHYLCRKAAGQRLPVPIIAEVDLYKFDPWDLPERALFGAREWYFFTPRDRKYPNGSRPNRAAGNGYWKATGADKPVAPRGRTLGIKKALVFYAGKAPRGVKTDWIMHEYRLADAGRAAAGAKKGSLRLDDWVLCRLYNKKNEWEKMQQGKEVKEEASDMVTSQSHSHTHSWGETRTPESEIVDNDPFPELDSFPAFQPAPPPATAMMVPKKESMDDATAAAAAAATIPRNNSSLFVDLSYDDIQGMYSGLDMLPPGDDFYSSLFASPRVKGTTPRAGAGMGMVPF

SEQ ID NO: 1538 - protein, 231 aa, Arabidopsis thaliana
MDQQDHGQSGAMNYGTNPYQTNPMSTTAATVAGGAAQPGQLAFHQIHQQQQQQQLAQQLQAFWENQFKEIEKTTDFKNHSLPLARIKKIMKADEDVRMISAEAPVVFARACEMFILELTLRSWNHTEENKRRTLQKNDIAAAVTRTDIFDFLVDIVPREDLRDEVLGSIPRGTVPEAAAAGYPYGYLPAGTAPIGNPGMVMGNPGGAYPPNPYMGQPMWQQQAPDQPDQEN

SEQ ID NO: 1539 - protein, 449 aa, Oryza sativa (indica cultivar-group)
MAQQQKKNAHVPKFGNWDNGGNVPYTVYFENARKGKVAAAGKMFNPNDPVDNPEAFSSSIAAPSPSRAPPPPPSHHERAPSDAPPPPPPAPYAGGSPYHRHAAGGGETPPARRGGGRTSGGGGSSYSVEHSPSPSPLHPYSDSGSGSYGGGLVANSRAKGGGGGAPRGNETPTRGSAVPRFGDWDSNPASADGYTHIFNKVREEKQTGQAAGKPAAGLGKGGAAAAGHGNAAKRYHDDDFASTVIPNIIRIMSTASTARSRKRAHDGSRQKVDVINLETTAPVVNTGSQHEALILRGTRTSPIDVEALDDKRRSRKIMRRSVAVVDPEKDTGPGGYGVAGAIFSRGRNFQGAVHVICLSPDREEGTSKPKNVAQTSTTHAKVAPKEPTFTCPVCLNKLDKPSTTNCGHIFCEKCIQACLKAQKKCPTCRKSLGIKSFHRVYLPTPADYD

SEQ ID NO: 1540 - protein, 207 aa, Triticum aestivum
MEGCDRIRGPWSPEEDSALRQLVERHGARNWTAIGRGVPGRSGKSCRLRWCNQLSPGVERRPFTAEEDAVIARAHARLGNRWAAIARLLRGRTDNAVKNHWNCSLKRRLGDLGADGVTEGDLDERPCKRASVTPESTSGSGSGSGSGSDRSDLSHGGAFGLGQVYRPVARVGGFEPADCAMSQRHEEEQEDPFTSLSLSLPGTDAMG

SEQ ID NO: 1541 - protein, 221 aa, Brassica napus
  misc_feature (171)..(171): Xaa can be any naturally occurring amino acid
SFIHHPTLSKLSSLQLSIPRVIRNRATSVFFSTMGLLEYAACDDLPSFQREIEEKGLDLDEPGLWYCKKLGSNKMGLEQRTPLMVAAMYGSKKVLSFIVSSGKSDVNRACGEERVTALHCAVAGCSVNMVEVINALLDASASASAVDANGNHPLDLFVRVSRFVASPRRKXVEMLLRGGGMINEAVEEEEEVKIVSKYPADASLPDINEGVYGSDELRMYS

SEQ ID NO: 1542 - protein, 184 aa, Lilium hybrid division I
MDRKVGTNEDVEVRKGPWTMEEDLILINYIANHGDGVWNTLARSAGLKRTGKSCRLRWLNYLRPDVRRGNITPEEQLLIMELHDRWGNRWSKIAKELPGRTDNEIKNFWRTRVQKKSKNGESSEGQISMLSDETSAMQMEDVDVGVSQTSYDQGQTSNNLDAFEIPFEPGDNLLSVEELWAMQY

SEQ ID NO: 1543 - protein, 173 aa, Solanum demissum
MAFFPTNFMLQTPHHEDEHQPSTSLNPILPSCSPQDFHGIASFLGKRSMSFSGMDGNNACEENHGEDDLSDDGSQAGEKKRRLNMEQVKTLEKNFELGNKLEPERKMQLARALGLQPRQIAIWFQNRRARWKTKQLEKDYEVLKRQFDAIKAENDALQTQNQKLHAELVFLEV

SEQ ID NO: 1544 - protein, 247 aa, Gerbera hybrid cultivar
MGRGRVELKRIENKINRQVTFAKRRNGLLKKAYELSVLCDAEVALIIFSNRGKLFEFCSTSNMLKMLERYQNCTYGSMEVDRSTPNAEQSSYKEYMKLKAKYESLQQYQRQLFGEDLGPLSLKELEQLERQLDSTLRQIRSIRTQSMLDRLSELQVKERMWVEANKALQNKLEEVYAENQAGPSWAAGEHHSSYGQEHQHQHQSQGFFQPLDCNSNLQIGYNTVDSSHITASTNGQNLNGLIPGWML

SEQ ID NO: 1545 - protein, 406 aa, Hordeum vulgare subsp. vulgare
MGSPDSSSGSAQKPPRHQHQHQPPPPRRQGSAPELPPGFRFHPTDEELVVHYLKKKAAKAPLPVTIIAEVDLYKFDPWELPEKATFGEHEWYFFSPRDRKYANGARPNRAATSGYWKATGTDKPILASATGCGREKVGVKKALVFYRGKPPRGLKTNWIMHEYRLTGASAGSTTTSRPPPVTGGSRAPASLRLDDWVLCRIYKKTSKAAAAVGDEQRSMECEDSVEDAVTAYPPYATAGMAGAGAHGSNYVQLLHHHDSHEDNFQLDGLLTEHDVGLSAGAASLGHLAAAARATKQFLAPSSSTPFNWLEASTGGSILPQARNFPGFNRSRNVGSMSLSSTADDMAGAVDVSDGGNAVNAMYLPVQDGTYHQHVILGAPLAPEAIAGAATSGFQHHVQISGVNWNP

SEQ ID NO: 1546 - protein, 247 aa, Gerbera hybrid cultivar
MGRGRVELKRIENKINRQVTFSKRRNGLLKKAYELSVLCDAEVGLIIFSSRDKLYEFGSVGVMKTLERYQRCCFNPQDNNNERETQSWYQEVSKLKAKFESLQRTQRHLLGEDLGPLSVKELHNLEKQLEGALTQARQRKTQIMVEQMEELRRKERELGDMNKHLKIKVSHELSTFDAEGQGYRAQLPCPWNSGTNNTFTMHPSQSNPMDCQQEPILQIGYNQFMHGEGSSVQRNMVGENGIHGWVL

SEQ ID NO: 1547 - protein, 625 aa, Zea mays
MKREYQNAGGNDGYRGSSKDKSMAAAAGAGEQEEEVDELLAALGYKVRSSDMADVAQKLEQLEMAMGMGGACPTADDGFVSHLATDTVHYNPSDLSSWVESMLSELNAPPPPLPPATPAPRLASTSSTVTSGAAAGAGYFDLPPAVDSSSSTYALKPIPSPVAAASADPSPDSAREPKRMRTGGGSTSSSSSSSSSMDGGRTRSSVVEAAPPATQAANGPAVPVVVVDTQEAGIRLVHALLACAEAVQQENFSAADALVKQIPVLASSQGGAMRKVAAYFGEALARRVYRLRPAPDGSLLDAAFADLLHAHFYESCPYLKFAHFTANQAILEAFAGCRRVHVVDFGIKQGMQWPALLQALALRPGGPPSFRLTGVGPPQPDETDALQQVGWKLAQFAHTIRVDFQYRGLVAATLADLEPFMLRPEGGGDTDDEPEVIAVNSVCELHRLLAQPGTLDKVLGTVRAVRPRIVTVVEQEANHNSGTFLDRFTESLHYYSTMFDSLEGAGSGSGSGSGSGQPTDASPPAGTDQVMSEVYLGRQICNIVACEGAERTERHETLVQWRGRLGGSGFEPVHLGSNAYKQASTLLALFAGGDGYRVEEKDGCLTLGWHTRPLIATSAWRVAAP

SEQ ID NO: 1548 - protein, 402 aa, Hordeum vulgare subsp. vulgare
  misc_feature (132)..(132): Xaa can be any naturally occurring amino acid
MGSSDSSSGSAPPRHQPPPPQQGSAPELPPGFRFHPTDEELVVHYLKKKAAKVPLPVTIIAEVDLYKFDPWELPEKATFGEQEWYFFSPRDRKYPNGARPNRAATSGYWKATGTDKPILASGCGREKVGVKXALVFYRGKPPKGLKTNWIMHEYRLTDASSSAATSRPPPVTGGSRAASLRLDDWVLCRIYKKINKAAAADQQRSMECEDSVEDAVTAYPPYATACMTGEGAHGSNYASLLHHQDSHEDNFLDGLLTAEDAGLSAGATSLSHLAAAARGSPAPTKQFLAPSSSTQFNWLDASTVGILPHARNFPGFNRSRNVGNMSLSSTADMAGAGTCAVDNGGGNAMNVMPPFMNHLPVQDGTYHQQHVILGAPLAPEATGAAASAFQHPVQISGVNWNP

SEQ ID NO: 1549 - protein, 287 aa, Zea mays
  misc_feature (118)..(118): Xaa can be any naturally occurring amino acid
  misc_feature (275)..(275): Xaa can be any naturally occurring amino acid
  misc_feature (282)..(282): Xaa can be any naturally occurring amino acid
SNPPTRPRRFPGAAQPEIMRAAEKDDSYAAHVTEACRDAFRHLFGTRVAVAYQNEIKLLGQSLYYLLTTGSGQQTLGEEYCDISQVATLHGLPPTPARRILFILYQTTVPYLAERIRXRGRVHALWQWVLQKWPSMLPYAQDFIQLAIRTNLMFFYFEGLYYHLPKRAAGIRYVFIGKPMNQRPRYQILGIFLLIQLCILGAERLRRSNISSIASSINQISSGGYPSTTGRGIPVLNEDGNIISDIRSGKAADIASHSETLHGKSKCTPCLSIRXNPTATPXGHVFC

SEQ ID NO: 1550 - protein, 528 aa, Zea mays
MAPRGGVVGSGAMLGLDMHLAQQRMHQAAAFQHQQDSHNGGFQLQQPSPVAVRQQQPPPSSFMPYSTNTSSSRVVVSAAAVGHDDEMVGNGGGGKGGVVVQQQQQQQLASAGCPWTRMKWTDAMVRLLIRVVYSVGDDGEGVATAGGAGGAAKAGPGHAAAAQQQKKGKWKSVSHAMMDKGFVVSPQQCEDKFNDLNKRYKRVVDLLGRGRACRVVENHALLDAIDELTPKAKNEARKLLSSKHLFFREMCAYHNSIAAAGSNLPPHGGGGAAGDTACLHHPPPAPVAAAASSAARYAHAQQHAAPSPQGMKDSSTDVADDSDDAMSDNGDEDEDEEEEDGPVYRSRRPRSRQHSGGRGKRGRGMDGAASEDLEDEADGGGGRRSRTAAAPDPSAILRQLKSELAAATAAAMDPQQARSWVRRRAVEVEEQQIVLESHAYYLERQRLKWERFRASKERDMERSRLQNDRLRIESRRLLLMLRHKDVDLDMAEANSSSVDHHTGASPLAAHQQQPIGSSPSPSTAGHPN

SEQ ID NO: 1551 - protein, 234 aa, Oryza sativa
  misc_feature (218)..(219): Xaa can be any naturally occurring amino acid
MATAGSRKGGRGRKALTAVLDNDANISAGKADVAAAAGILSPPQKAKRATSKSSKGKAAAAAAAEEQASVVDAVSELQGMLEELRLEKEKAEEMVRERDEVIRRKEEEQGRLQAELKKVQRAKEFKPTVSIPLVKALIEKDQEGEKKKGKGKAGHERKKPCPAYVLWCKDQWNEIKKESPDADFKEVSNALGAKWKALGAEEKQPYEERYRQEKEAYXXVVGQEKREAEAMKLL

SEQ ID NO: 1552 - protein, 262 aa, Gentiana triflora
MGRGRVQLRRIENKISRQVTFSKRRNGLLKKAHEISVLCDAEVALIVFSSKGKLFEYSTDSSMESILERYERYSYDEKRINGTESQAKDNWSMEYPKLVSRIELLQKNIRHYEGEDLNPLNMRELQSLEQQLDTALKKIRTRKSQLMHDSVSELQKKEKALQEQNNLLAKKLKENEKNITQQRMQSADQHRLVDVSNHPPPPSPPPLFPQSLSIQPPLQQPGIHFQTSETIGSDGGDGNQNGTEAAAGTNTHMPPWMVRHLN

SEQ ID NO: 1553 - protein, 222 aa, Solanum macrocarpon
MVRQKIQIKKIDNLTARQVTFSKRRRGLFKKAQELSTLCDADIGLIVFSATGKLFEYSSSSMMQLIEKHKTQSERDNMNGSEQLKSSNLQSEKKTYAMLSRELVEKNRELRQLHGEELQGLGLDELMKLEKLVEGGISRVLKIKSDKFTREISSLKKKEAQLQEENSQLKHQSQARLNEEGQNAIEQGHSADSITNNRSLVSSHQDYDDSDTSLKLGLGFPY

SEQ ID NO: 1554 - protein, 443 aa, Triticum aestivum
  misc_feature (29)..(29): Xaa can be any naturally occurring amino acid
PPPRTTKFPPPYPFHLDIHRKWTPPPPPXAPAAAAQPPPPPPPPYLPPRLVIDGAGGGSGAAARACRHHAYSRKQKSLGLLCSNFVALYDRDDVETVGLDDAARRLGVERRRIYDIVNVLESVGILVRRAKNRYTWIGFEGVPAALKELKERTLREMSGLAPPPEESSAANVSDDEDDDDKLGDADGDADSEKLSQSLDNASDKPNVPMCPPRSVDHRKEKSLGLLTQNFVKLFLTMEVETVSLDEAARLLLGERHAESNMRTKVRRLYDIANVLSSLNLIEKTQQVDSRKPAFRWLGQAKRKEGATVTVALPPSRKIMSSKRAFGTDITNIDNKRGKLVLETENKPKLMQGGSSMLKTFESQLGQGKSSGFVYGPFHPAGARKHEVDDQTVRENEMKNIQDWESLAVSFRPQYQNHALNDLFGHYVEAWKSWYLDLTRDSTS

SEQ ID NO: 1555 - protein, 252 aa, Gentiana triflora
MDSQNQEIESSNSRKSGRGKIEIKRIENKTNRQVTFCKRRSGLLKKAYELSVLCDAEVALIVFSSSGRLYEYANNSAKGTIERYKKACGDSTSAGSVSEANIQFYQQEANQLRKNIRDIQSSNRHILGEGLDELSFKQIKNLEGRVEKGIARVRSRKNELLAAEIELMKKREIELQNANLYLRAKQITENDQQRVQAEQQQMNFMPASDYQTNNNNIASEPNYQEVHNFIPVNFLDHNQHYSSQDPTALQFV

SEQ ID NO: 1556 - protein, 249 aa, Gentiana triflora
MDYPPRQEFDSSSSRKSGRGKIEIKRIENATNQQVTFCKRRSGILKKAYELSVLCDAEVALIVFSTRGRLYEYASSSVRGTIERYKKACADTTNSGSISEANTQFYQQQSNKLRKDIKEIQKANRNMLGEGVESIQPKDLKKIEGNLERAIGKIRTRKNELLFAEIELMQKREMELQNANLYLRAKIAENERATTDPHMNLMPASASEYHHHQSMASHSFDDVRSFIPVNLLEPNQHYSRQDPTALQLV

SEQ ID NO: 1557 - protein, 177 aa, Zea mays
QLLIDQIIVRDLTCGICFESCPRGSMSAAACGHPFYGTCWRGYISTAISDGPGCLMLRCPDPSCAAAVGQDMINSLANVEDTEKYGRYLRRSYIEDNRKTKWCPAPGCEYAAEFVMGSGSYDVNCNCSYGFCWNCTEEAHRPVDCATVSKWILKNSVESENMNWYRRNKQKLPKLII

SEQ ID NO: 1558 - protein, 431 aa, Glycine max
MPHPSFHKLLLPSTVQPNQQLRLPDNFMRKYGGELSPIVTLSVPDGSVWHVGLKKADNKYCFLDGWKEFVQRYSIGVGYLLVFRYEGKSSFNVHIFNLATSEINYQSVTRSSNEGLHFTNCLKFFEEMEGEDSIEISDSSPSHLSPSSLQNQALAGSVDKMMPGKSYNTPPALQNLFNGSKLNSINWGEGGNAHSSRSANSLDNRLTRDIGLQFNAVEFKRSTEELKLRASIEERMKKTTRKKRKSDGQEPSAGHEEEVEMRFRFYESASARKRTVTAEERERVINEAKAFEPSNPFCRVVLRPSYLYRGCIMYLPSCFAEKHLNGVSGFIKLQISNGRQWPVRCLYKGGRAKLSQGWFEFSLENNLGEGDVCVFELLRMKEVVLQVTIFHVTEDVGLLSPPLQHNQNMTSAKLLSTPLQQHLTSTKMVRN

SEQ ID NO: 1559 - protein, 244 aa, Gentiana triflora
MGRGKVELKRIENKINRQVTFAKRRNGLLKKAYELSVLCDAEVALIIFSNRGKLYEFCSGSSTTETVERYQRYTYGLQDAGHPSDDPQNSYQEYVKLKARVEVLQGYHRNFLGEDLGSLSCKELEHLEHQVETSLKQVRSTKTSFMLDQVADLQRKEEMLAEENKALRGKLDERANQVPLRLSWEGRQQAPTGYNNVPAHTQGFFQPLGLNSTLQMGYNQGGAEGNYNVHAGNNINGFMPGFMN

SEQ ID NO: 1560 - protein, 244 aa, Glycine max
MEYSQYTTYSAEGVEAETYTSSCTTPSRSKKRNNNNTRRFSDEQIKSLETMFESETRLEPRKKLQLARELGLQPRQVAIWFQNKRARWKSKQLERDYGILQSNYNSLASRFEALKKENQTLLIQLQKLNHLMQKPMEPGQRCTQVEAANSMDSESENGGTMKCEAEGKPSPSMEISEHLLGVLSDDDTSIKVEDFGLEDEHGLLNFAKHVDGSLTSPEDWNAFESNDLLGQSTTDDYQWWDFWS

SEQ ID NO: 1561 - protein, 224 aa, Medicago truncatula
MYQSSYQHMNDPNNDGKSKEWTWDENKIFETILFEYLEEVQEGRWENIGLVCGRSSTEVKEHYETLLHDLALIEEGLVDFSTNSDDFIISKASTDENKAPPTKNKTKKVVRVKHWTEEEHRLFLEGIEIHGKGKWKLISQHVRTRTASQVASHAQKHFLHQLDGTSKKTYKKRSNFYITSLKGNSKPLLNKDNIPSPSTSWDGNFHPLLYKDNYVPALPSPHLN

SEQ ID NO: 1562 - protein, 294 aa, Triticum aestivum
  misc_feature (137)..(137): Xaa can be any naturally occurring amino acid
  misc_feature (224)..(224): Xaa can be any naturally occurring amino acid
MAACRGGGGGKDVDRIKGPWSPEEDDALQRLVGRHGARNWSLISKSIPGRSGKSCRLRWCNQLSPQVEHRPFTPDEDDTILRAHARFGNKWATIARLLSGRTDNAIKNHWNSTLKRKYSSSSSASASPADDAMANDXRTAGPLKRTSSDGYPGALLQPPGARPGSDLSDSSHQSLPSGHGRPAASQQPHVYRPVARAGGVVVLPTATPQPSPPCPSPPAPPPPXATSLSLSLSLPGLDAPEPAPVAQPMSCQPPLLLLLYSPPQRSECRAATMPSCSAAPEPSTAGGLSRGVLS

SEQ ID NO: 1563 - protein, 224 aa, Medicago truncatula
MYQSSYQHMNHTNNNDGKSKEWTWDENKIFETILFEYLEEVQEGRWENIGLVCGRSSTEVKEHYETLLHDLALIEEGLVDFSTNSDDFISKASIDEKKDPPTKNKTKKVVSVKHWTEEEHRLFLEGIEIHKKGNWKMISQHVRTRTASQVASHAQKHFLHQLDGTSKKTYKKRSNFYITSLKGNSKPLLNKDNIPSPSTSWDGNFHPLLYKDNYVPALPSPHLN

SEQ ID NO: 1564 - protein, 755 aa, Solanum demissum
MAGKNSGDNRTRTSVSIFIVAGLCCFFYLLGAWQRSGFGKGDSIAVAVTKTAGENCDILPNLNFETRHAGEAGGTDESEEVEELKPCDPQYTDYTPCQDQKRAMTFPRENMNYRERHCPPQEEKLHCLIPAPKGYVTPFPWPKSRDYVPYANAPYKSLTVEKAIQNWVQYEGNMFRFPGGGTQFPQGADKYIDQLASVVPIENGTVRTALDTGCGVASWGAYLWKRNVIAMSFAPRDSHEAQVQFALERGVPAVIGVLGTIKMPYPSKAFDMAHCSRCLIPWGAAGMYLMLISRKMLTEFLDLEATGCFLDLLSTGRSILRPGNAPRRILRKNKGRLKRLLNFFAGRRYLRRERLLFGRKERIVPHAVLHKKIQQPDSIVCVGGSQIFSWENEKHVKKVQYVNLNCLGGRKFTKYAGQSICHNLIRYNKMEMCITPNNGNGGDESLKPFPERLYAVPPRIANGLVSGVSVAKYQEDSKKWKKHISAYKKINKLLDTGRYRNIMDMNAGLGGFAAALHSPKFWVMNVMPTIAEKNTLGVIFERGLIGIYHDWNSVCVYSCHAISVCLCLHRSFSFFNIFIIAFYSCISFRPILKNDFLETKGLSKTIFLPHKGFTTPHTPLVGLWDHMIETLLSPGSKCFVYMLELRSRLPPKCEAFSTYPRTYDLIHASGLFSLYKDKCEFEDILLEMDRILRPEGAVILRDNVDVLIKVKKIIGGMRWNFKLMDHEDGPLVPEKILVAVKQYWTLGDTNSTSSQ

SEQ ID NO: 1565 - protein, 316 aa, Glycine max
MTRRCSHCSHNGHNSRTCPNRGVKLFGVRLTDGSIRKSASMGNLTHYAGSGSGPLHTGLNNPGSPGETPDHAAAVADGYLSEDFVPGSSSSSRERKKGVPWTEEEHRMFLLGLQKLGKGDWRGIARTYVISRTPTQVASHAQKYFIRQSNVSRRKRRSSLFDIVADEAADTAMVQQDFLSANQLPTETEGNNPLPAPPPLDEECESMDSTNSNDGEPAPSKPENTQSSYPMLYPAYYSPVFPFPLPYWSGYSPESTKKEETHEVLKPTAVHSKSPINVDELVGISKLSLGESIGDSGPSSLWSLLSVSKTYRRRTL

SEQ ID NO: 1566 - protein, 522 aa, Oryza sativa (japonica cultivar-group)
MLSSCAPTAVPPQDASGAATEPFRSLQIATAGAAAKKKRRPAGDTWTLLESDRYVCEICNQGFQRDQNLQMHRRRHKVPWKLLKREAGEAARKRVFVCPEPTCLHHDPSHALGDLVGIKKHFRRKHSGHRQWACSRCSKAYAVHSDYKAHLKTCGTRGHTCDCGRVFSRVESFIEHQDACNAGRPRAAEASSSPGRGGGVVVGAPAAASSSQQQQLFAVPASLSRTASSASPSSDLVVSPVAWPATGGGGPAMVSPRAAAPAPAGGSIAAFHHRFTDPALSPPTPCGGRRGGCHTTHSLELQLMPPRTTTTCAGGSLGGTPVATAVGYYASSSPHSPAAALPSRQPVADAMRLQLSIGFGGARDDGNNNSSSSSGEVSASATRLKEAAHEQLRLAMAEKAAADEARAQAKRQAELADQELATARRMRYQAQVELSRAHVLRDHAIRQVDATQLQITCYSCSHKFRARAAAMISSDVASYVSSVVTEGGDAEVDNDGNLHRRRLNADDGMPRGHSRTMAMDLN

SEQ ID NO: 1567 - protein, 324 aa, Arabidopsis thaliana
METEEEMKESSISMVEAKLPPGFRFHPKDDELVCDYLMRRSLHNNHRPPLVLIQVDLNKCEPWDIPKMACVGGKDWYFYSQRDRKYATGLRTNRATATGYWKATGKDRTILRKGKLVGMRKTLVFYQGRAPRGRKTDWVMHEFRLQGSHHPPNHSLSSPKEDWVLCRVFHKNTEGVICRDNMGSCFDETASASLPPLMDPYINFDQEPSSYLSDDHHYIINEHVPCFSNLSQNQTLNSNLTNSVSELKIPCKNPNPLFTGGSASATLTGLDSFCSSDQMVLRALLSQLTKIDGSLGPKESQSYGEGSSESLLTDIGIPSTVWNC

SEQ ID NO: 1568 - protein, 348 aa, Brassica nigra
MLKQESNWAQACDTCRSAACTVYCRADSAYLCTSCDAQIHAANRLASRHERVRVCESCERAPAAFFCKADAASLCTACDSQIHSANPLARRHQRVPILPISGCVATNHHSSETTEPENIVVVGQEEEDEAEAASWLLPSSVKNCGDNNNNNNNNNISENNRFSVGEEYLDLVDYSSSIDKRFTGQTNQYQQDYNVPQRSYVADGVVPLQVGVANGHMHHEKHNFQFGFTNVSSEASPIHMVSLVPESVTSDATVSHPRSPKAGTEELPEAPVQMLSPMERKARVLRYREKKKTRKFEKRIRYASRKEYAEKRPRIKGRFAKRNEVDADHALSTMVMFDTGYGIVPSFS

SEQ ID NO: 1569 - protein, 263 aa, Triticum aestivum
MESDAGENLFGTFSSSTTSITASSSSSPTSSTTTSSNSCTKHDSKISPPQNQNTPNSKKRQRSDDNENKHHPSYRGVRMRAWGKWVSEIREPRKKSRIWLGTYPTAEMAARAHDVAALAVKGHSAFLNFPNLAQDLPRPTTTSPKDIQAAAAKAATTTFFDDEIVNHCQAEKAEQNHGEQQASPSTLCMMDNSTEAEQIQAEQASSTQESSSSHSTADEETLFDLPDLFPDGNSGLFSYSSCWHLCAVDSGFRLEEQFLWENF

SEQ ID NO: 1570 - protein, 247 aa, Arabidopsis thaliana
  misc_feature (23)..(23): Xaa can be any naturally occurring amino acid
MGPMIRTEEEEDYTSPPWLMPMXLRGSYFVPCSIHVDSNKNECNLFCLDCAGNAFCSYCLVKHKDHRVVQIRRSSYHNVVRVNEIQKFIDIACVQTYIINSAKIVFLNERPQPRIGKGVTNTCEICCRSLLDSFRFCSLGCKLGGMRRGDLSLTFSLKGKHGREYLGGSESDEATTPTKMRKTNAFNRLMSGLSISTVRFDDYGPNGDQRSSSSGDEGGFSFSPGTPPIYNHRNSSRRKGVPHRAPF

SEQ ID NO: 1571 - protein, 351 aa, Oryza sativa (japonica cultivar-group)
MASNGAAAGAMAPFFPPNFLLQMQQPLPLHHQHLQDHAHGGHGGHHLLPPPPPSLSPFLPDLAMDAPPPPMYEASGGDGGGGGAASEDEEDGCGGGGGGGGGEKKRRLSVEQVRTLERSFESGNKLEPERKAQLARALGLQPRQVAIWFQNRRARWKTKQLEKDFDALRRQLDAARAENDALLSLNSKLHAEIVALKGGAAAAGGGGSSCRQEAASELINLNVKETEASCSNRSENSSEINLDISRPAPPPPPPPANESPVNRGIPFYASIGRGGAGGVDIDQLLLRGGHSPSPAAVTTPPPPKMELGITGNGGGADVLTTGAGSFGGLLCGAVDEQPPFWPWADGHHHFH

SEQ ID NO: 1572 - protein, 246 aa, Glycine max
  misc_feature (19)..(19): Xaa can be any naturally occurring amino acid
MEFPTEAILSEGSISQKKXGRGKLEIRGIENTTNRQVTFCKRRNGLLKKAYELSVLCDAEVALVVFSSRGRLYEYANNSVRGTIERYKKACAASTNAESVSEANTQFYQQEASKLKRQIRDIQNLNRHILGEGLSSLSLKELKNLESRLEKGLSRVRSRKHETLFADIEFMQKREIELQNHNNFLRAKIAENERAQQRQQDMIPGTECESTIPNSQSYDRNFFPVNLIDSNNNQYSRQDQTALQLV

SEQ ID NO: 1573 - protein, 239 aa, Solanum macrocarpon
MAREKIKIKKIDNITARQVTFSKRRRGLFKKAEELSVLCDADVALIIFSATGKLFDFASTSMKDILGKYKLQSASLEKVEQPSLDLQLENSLNMRLNKEIADKTRELRQMRGEELEGLSLEELQQIEKKLEAGFNRVLEIKSTRIMGEITNLQRKGAELMEENKQLKQKMEIMKKGKLPLVTEMVMEDGQSSESIITSNNVCSSNSGPPPDQDDSSKIGGNAVEDDCSITSLKLGLPFS

SEQ ID NO: 1574 - protein, 360 aa, Zea mays
MVVKEFGREVVMSMDKVKRGGEALTAAGAGDEEKDDAVLPGFRFHPTDEELVTFYLRRKVARKPLSMEIIKEMDIYKHDPWDLPKASTAAGGEKEWYFFCLRGRKYRNSIRPNRVTGSGFWKATGIDRHIYPATANPVESVSVGLKKSLVYYRGSAGKGTKTDWMMHEFRLPPAAAASPTPTSMQEAEVWTICRIFKRNIAYKRQPQLPAWRQQQSSSNTGSFESDGGGGGDEYMNRCLPVPATATAHQIGGMLNGGGVVSATRSSSSSFFRDRESVHGGQQFHFHEQWLSRFPAAPAVEQKPQLLDPSAMAIAFHQNDDQSVATAAAASECCKDGYYWDEIARFMEVNDPTVLHDCRYA

SEQ ID NO: 1575 - protein, 556 aa, Arabidopsis thaliana
MDSEEDMLDAHDMESGEDDFYSGGTDDCNDSDDGEPDYGFVEEDADDSAMIASHRSQKNFCVLREEDIRRHQMDNIERVSVVLSITEVEASILLRHFHWSVGRVHDEWFADEERVRKTVGILESHVVPPSDDSELTCGICFDSYPPEKIASVSCGHPFCTTCWTGYISTTINDGPGCLMLRCPDPSCLAAVGHDMVDKLASEDEKEKYNRYFLRSYIEDNRKMKWCPAPGCDFAIDFVAGSGNYDVSCLCSFSFCWNCTEEAHRPVDCSTVSKWILKNSAESENMNWILANSKPCPRCKRPIEKNQGCMHMTCTPPCKYEFCWLCLGAWMDHGERTGGFYACNRYEVAKQEGQYDETERRREMAKNSLERYTHYYERWASNQSRQKAMADLQQAQKLSDKQCTPESQLKFILEAWLQIIECRRVLKWTYAYGYYLPEHEHAKRQFFEYLQGEAESGLERLHQCVEKDLVQFLIAEGPSKDFNDFRTKLAGLTSVTKNYFENLVKALENGLADVDSHAACSSKSTSSKSTGCSSKTRGKGKGSSRTGGSSRNPDDNL

SEQ ID NO: 1576 - protein, 218 aa, Arabidopsis thaliana
MKPGYNGLHYFGYERFFDSVTLFEWLSHYSSGGRGKMASRVVRTSMRLRRRDGVTQNEHQGDQQVADQAPTVPQIVATPPRINVVAIEDDDDVVESTASAFAQAKNKSRSARRGSQVVDVESAGANRSTRRRSDQTSVDSVELNKPRKSKAVAPPVEEPKFSCPICLCPFTQEVSTKCGHIFCKKCIKNALSLQAKCPTCRKKITVKDLIRVFLPTTR

SEQ ID NO: 1577 - protein, 337 aa, Arabidopsis thaliana
MSTDSSQFEVVPANASALDNDVSSHMSMLYQDIVRNPELFWEMLRDFHESSDKKFKIPIVGGKSLDLHRLFNEVTSRGGLEKVIKDRRCKEVIDAFNFKTTITNSAFVLRKSYLKMLFEFEHLYYFQAPLSTFWEKEKALKLLIEKSANRDKDSQELKPGTVITGIIDGKFESGYLISTKVGSEKLKGMLYHISPETKRGKKKAKSSQGDSHKPPKRQRTGYNFFVAEQSVRIKAENAGQKVSSPKNFGNMWTNLSESDRKVYYEKSREDGKRYKMEILQYRSLMESRVAEIVAATDAGTSASAAETADEASQENLAKTDACTSASSAAETEDEVSQ

SEQ ID NO: 1578 - protein, 186 aa, Glycine max
MGRRKIEIATLKDPNTRQVTFSKRRTGLFKKANELSILCGAEIAIVVFSIGNKPYSFGHPGVDVIAAKFLQEAANSSDAKQIDAQGNNPSNELGDMNRLNQQLSDVQTQILEEEKKGAEHDERLKQHQVTQLSQYKELQASYLELQHRVKDYVNAIEVSECMILLAQEPVVGITKQMTATKRRKKN

SEQ ID NO: 1579 - protein, 236 aa, Cucumis sativus
MGRGKIEIKRIENTTNRQVTFCKRRNGLLKKAYELSVLCDAEVALIVFSTRGRLYEYANNSVRGTIERYKKAFADSSNSGLSVAEANVQFYQQEATKLKRQIREIQNSNRHILGEALSSLPLKELKSLEGRLERGISKVRAKKNETLFAEMEFMQKREMELQSHNNYLRAQIAEHERIQQQQQQQQQTNMMQRATYESVGGQYDDENRSTYGAVGALMDSDSHYAPQDHLTALQLV

SEQ ID NO: 1580 - protein, 125 aa, Argyroxiphium caliginis
TNRQVTYSKRRNGIFKKALELTVLCDAKVSLIMFSNTGKFHEYISPSTTTKKIYDMYQTTLRFDLWTSHYERMTETMKKLKESNNKLRREIRRRVLGEDLDGLDMNDLTILEQQTQDSLTVVRER

SEQ ID NO: 1581 - protein, 681 aa, Arabidopsis thaliana
MGSWMWKKLFKYRDCAKTMHKVEIKSGSSTSFWFDNWSQLGRLIDITGPRGVIDLGIPLDAMVETALHPRRRRKHRVDVLNRIEAEIHTTRQRIRINEKDISMWRFVGDKFKTTFSTKFTWNNIRGTHPTVVWSKGVWFSYSTPKYSFLTWLPIHNKLATGDRIKKWNTGQHVHCVLCTNTEETRDHLFFSCPYSSTIWENLAHRLLQTNYSSNWHQLTAMLHNTSTPRLHLFLLRYVFQATLYHIWRERNARRHGEIPTTTIRQIKLIDGTKKKERRRRNEKPVIAPSSLPNDVVEEIFLRFPVKALFRLKTLSKQWRSTIESQSFEERHLKIAERFHAHHPRVMVITEKDPLKLLPRPRPDADIGFRLFCLESGSLLSFILLNFPQSFANYIYVSGCCDGLFCVHSPRSQAMYVVNPATRWLRQLPPARFQILMQKATYRDWLDMKSVFHLAFVKANDYKLVWLYNSDKYNADALSPNEGVTKCEVFDFRANSWRDLTCTPSYRIFHGQIPACANGSVYWLTEPYNDKIEVVAFDIHAESFRLLPKIKPAIAGSDPMHIDMCTLDNGLCMSKREPNTLVQEIWRLKSSEDSWEKICTIDLLSCSSSRTQFRDEFYWDEQDLVNPSTPVALCKNKTILLSHRYSRGLLKYDPLTKSLASFYQRPLSRRKVSYFQSLISHI

SEQ ID NO: 1582 - protein, 125 aa, Argyroxiphium sandwicense
TNRQVTYSKRRNGIFKKAHELTVLCDAKVSLIMFSNTGKFHEYISPSTTTKKIYDMYQTTLGFDLWTSHYERMTETMKKLKESNNKLRREIRQRVLGEDLDGLDMNDLTILEQQMQDSLTVVRER

SEQ ID NO: 1583 - protein, 622 aa, Zea mays
MKREYQNAGGSDGYMGSSKDKSMAAAAGAGEQEEEVDELLAALGYKVRSSDMADVAQKLEQLEMAMGMGGACPTADDGFVSHLATDTVHYNPSDLSSWVESMLSELNTPPPPLPPATPAPRLASTSSTVTSGAAAGAGYFDLPPAVDSSSSTYALKPIPSPVAAASADPSPDSAREPKRMRTGGGSTSSSSSSSSSMDGGRTRSSVVEAAPPATQAANGPAVPVVVVDTQEAGIRLVHALLACAEAVQQENFSAADALVKQIPVLASSQGGAMRKVAAYFGEALARRVYRLRPAPDGSLLDAAFADLLHAHFYESCPYLKFAHFTANQAILEAFAGCRRVHVVDFGIKQGMQWPALLQALALRPGGPPSFRLTGVGPPQPDETDALQQVGWKLAQFAHTIRVDFQYRGLVAATLADLEPFMLRPEGDGDTDDEPEVIAVNSVCELHRLLAQPGTLDKVLGTVRAVRPRIVTVVEQEANHNSGTFLDRFTESLHYYSTMFDSLEGAGSGSGQPTDASSPAAAGGTDQVMSEVYLGRQICNIVACEGAERTERHETLVQWRGRLGGSGFEPVHLGSNAYKQASTLLALFAGGDGYRVEKKDGCLTLGWHTRPLIATSAWRVAAP

SEQ ID NO: 1584 - protein, 282 aa, Arabidopsis thaliana
AKTKYGERHRKGLWSPEEDEKLRSFILSYGHSCWTTVPIKAGLQRNGKSCRLRWINYLRPGLKRDMISAEEEETILTFHSSLGNKWSQIAKFLPGRTDNEIKNYWHSHLKKKWLKSQSLQDAKSISPPSSSSSSLVACGKRNPETLISNHVFSFQRLLENKSSSPSQESNGNNSHQCSSAPEIPRLFFSEWLSSSYPHTDYSSEFTDSKHSQAPNVEETLSAYEEMGDVDQFHYNEMMINNSNWTLNDIVFGSKCKKQEHHIYREASDCNSSAEFFSPSTTT

SEQ ID NO: 1585 - protein, 125 aa, Dubautia laevigata
TNRQVTYSKRRNGIFKKAHELTVLCDAKVSLVMFSNTGKFHEYISPSTTTKKIYDMHQTTLGFDLWTSHYERMTETMKKLKESNNKLRREIRQRVLGEDLDGLDMNDLTILEQQMQDSLTVVRER

SEQ ID NO: 1586 - protein, 274 aa, Oryza sativa (japonica cultivar-group)
MTKKVIPAMAAARQDSCKTKLDERGGSHQAPSSARWISSEQEHSIIVAALRYVVSGCTTPPPEIVTVACGEACALCGIDGCLGCDFFGAEAAGNEEAVMATDYAAAAAAAAVAGGSGGKRVRRRRKKNVYRGVRHRPWGKWAAEIRDPRRAVRKWLGTFDTAEEAARAYDRAALEFRGARAKLNFPCSEPLPMPSQRNGNGGDAVTAATTTAEQMTPTLSPCSADAEETTTPVDWQMGADEAGSNQLWDGLQDLMKLDEADTWFPPFSGAASSF

SEQ ID NO: 1587 - protein, 199 aa, Theobroma cacao
QVKGSENPRSHYKCTYPNCPTKKKVERSLDGQITEIVYKGSHNHPKPQSTRRSSSHAACTNSEISDQSGGTLGNEQTDSFLVQEDTSGSIGEDEFDQASSLSNPGGDDNENEPDAKRWKGENENEGIIGSGSRTVREPRIVVQTTSDIDILDDGYRWRKYGQKVVKGNPNPRSYYKCTTIGCPVRKHVERASHDLRAVI

SEQ ID NO: 1588 - protein, 371 aa, Oryza sativa (japonica cultivar-group)
MAPAAGDDAVVPRKGAGGGGTTTPPPPPPAQQQQQQPLPPPPPQEQGLRCPRCDSPNTKFCYYNNYSLSQPRHFCKTCRRYWTKGGALRNVPVGGGCRKNKRSRSAAAASRLSLNLPTVEGIGGAAADPAAAAAARLGFLGGGTTMMMSSSTSPLGGAAAAVADFQQGGAVGMLPLPRLQSPAGGGVGHHQYVPFGEWPSGDIAGGNAVNGGGGHGAVSSTIASSIESLSFINQDLHWKLQQQRLATMFLGPPGSASAAAAAAQANDGGGNGAQATASGHAAGGGGGAFMHMAGSVPSMEAAMPSATSWFMDSCSYGLPSPPPPATAAVAATTSSNLNSGGRSSGGDDNATSNCGSAIPAWGDISTFAMLP

SEQ ID NO: 1589 - protein, 249 aa, Physalis peruviana
MAREKIKIKKIDNITARQVTFSKRRRGLFKKAEELSILCDADVALIIFSSTGKLFDFSSSSMKDILGKYKLQSANLDKVDQPFLDLQLENSLNVRLRKQVADKTRELRQMKGEELEGLSLEELQQIEKRLEAGFNRVLEIKGTRIMDEIANLQRKGAELMEENKKLKQKMEMMKLGKLPLLTDMDCMVMEEGQSSDSIITTNNVCSSNTGPPPEDDSSNASLKLGCNNGLAPVDDDCSITSLKLGLPLS

SEQ ID NO: 1590 - protein, 241 aa, Oryza sativa (japonica cultivar-group)
MSSHDFARRVPKRRRTNKLLSQLLPDLNSLPAEGADDGGSPSSSVLVSHAQTSAVAVAGTSQYLVPAVVAGPHIGMSSCPIIVDDINDDVVIYSASSFPQVRQQAPRTEPVVTIEDDSETTPGQAGDAVDEHVDILLSLTLGRYPRHGHQRSSNISTSPVIHIIDTPSNALPEPEKAVPKEPTFNCPVCMNELVEPSSTICGHIFCKQCIKASIQAQKKCPTCRRKLTMNNFHRVYLPSAE

SEQ ID NO: 1591 - protein, 247 aa, Physalis peruviana
MAREKIKIKKIDNITARQVTFSKRRRGLFKKAEELSILCDADVALIIFSSTGKLFDFSSSSMKDILGKYKLQSANLDKVDQPFLDLQLENSLNVRLRKQVADKTRELRQMKGEELEGLSLEELQQIEKRLEAGFNRVLEIKGTRIMDEIANLQRKGAELMEENKKLKQKMEMMKLGKLPLITEMECMVMEEGQSSDSIITTNNVCSSNTGPPPEDDSSNASLKLSCNNGLAPVDDDCSITSLKLGLS

SEQ ID NO: 1592 - protein, 517 aa, Oryza sativa (japonica cultivar-group)
MAQLDITIFQIMVFEQPSGKQCRTITKDDNEEDKKGEKTNGKGCSSSSSGGARRRARERESEESLGEMGECRGGGGGGDGLIKLFGKTIPVQPDAKFLILGSASLGEFSDVQQHSGSSSSSTESDVQETAAVAVADPSPRSEVVDGESPPQPGGEAASHQQQQKEMKLKKPDKILPCPRCSSMDTKFCYFNNYNVNQPRHFCKHCQRYWTAGGAMRNVPVGAGRRKNKNATAAAHFLHRVRACAAAAAMPAAPHDATNATVLSFGGGGGGHDAPPVTLDLADKMTRLGKEGLVAHARNADAAAACSEVSSNRDDEQIGNTVAKPANGLQQHPPPPHHHHHSAMNGGGIWPYYTSGIAIPIYPAAPAYWGCMIPPPGAWSLPWPATVQSQAISSSSPPTSATPSVSSFTLGKHPREGGDHEARDHHGNGKVWVPKTIRIDNADEVARSSIRSLFAFRGGDKADDNNDDDGTGVHKLATTVFEPKRDSKTAKHPAITSLPLLHTNPVALTRSATFQEGS

SEQ ID NO: 1593 - protein, 213 aa, Panicum maximum
SKRRNGLLKKAYELSLLCDAEVALIIFSGRGRLFEFSSSSCMYRTLERYRSSNYTTQEVKTPLDGEINYQDYLKLKTRVEFLQTTQRNILGEDLGPLSMKELEQLENQIEVSLKHIRTRKNQMLLDQLFDLKSKEQELQDLNKDLRKKLQETNAENVLHVSWEEGGHSGTSGNAMEPYQGFLQHQENDPSLQIGYHQQAYIDQLNEDMADPNE

SEQ ID NO: 1594 - protein, 260 aa, Solanum lycopersicum
MCGGAILADIIPPRDRRLSSTDLWPTDFWPISTQNVPLNPKRARPSTGGEQMKKRQRKNLYRGIRQRPWGKWAAEIRDPRKGVRVWLGTFNTAEEAARAYDREARKIRGKKAKVNFPNEDDDHYCYSHPEPPPLNIACDTTVTYNQESNNCYPFYSIENVEPVMEFASYNGIEDGGEEMVKNLNNRVVEEEEKTEDEVQILSDELMAYESLMKFYEIPYVDGQSVAATVNPAAETAVGGGSMELWSFDDVSRLQPSYNVV

SEQ ID NO: 1595 - protein, 120 aa, Theobroma cacao
  misc_feature (112)..(112): Xaa can be any naturally occurring amino acid
NPEFSSTLASHDDDNDDRATQGSISLCDDAANDDESESKRRKTESCLTEMNATSGALREPRVVVQIESDVDILDDGYRWRKYGQKVVKGNPNPRSYYKCTTPGCPVRKHVEXASHNLKCV

SEQ ID NO: 1596 - protein, 141 aa, Oryza sativa
GLLLPLPAAAASASAAQMGGKCPHRKVKKRRLSHKTARRGKFLVKADDAVYDELVKLADAGKDADATQLPVDEDLPGMGQFYCLHCDRYFASESVKEEHYRSKRHKKRIKQMSGPAPHTQLDAELAAGMGMPDNGLKLMSM

SEQ ID NO: 1597 - protein, 297 aa, Arabidopsis thaliana
MANNNNIPHDSISDPSPTDDFFEQILGLSNFSGSSGSGLSGIGGVGPPPMMLQLGSGNEGNHNHMGAIGGGGPVGFHNQMFPLGLSLDQGKGHGFLKPDETGKRFQDDVLDNRCSSMKPPMSQPAPPMPHQQSTIRPRVRARRGQATDPHSIAERLRRERIAERIRSLQELVPTVNKTDRAAMIDEIVDYVKFLRLQVKVLSMSRLGGAGAVAPLVTEMPLSSSVEDETQAVWEKWSNDGTERQVAKLMEENVGAAMQLLQSKALCIMPISLAMAIYHSQPPDTSSSIVKPEMNPPP

SEQ ID NO: 1598 - protein, 125 aa, Dubautia latifolia
TNRQVTYSKRRNGIFKKAHELTVLCDAKVSLIMFSNTGKFHEYISPSTTTKKIYDMYQTTLGFDLRTSHYERMTETMKKLKESNNKLRREIRQRVLGEDLDGLDMNDLTILEQQMQDSLTVVRER

SEQ ID NO: 1599 - protein, 125 aa, Dubautia laxa
TNRQVTYSKRRNGIFKKAHELTVICDAKVSLIMFSNNGKFHVYISPSTTTKKIYDMYQTTLGFDLWTSHYERMTETMKKLKESNNKLRREIRQRVLGEDLDGLDMNDLTILEQQMQDSLTVVRER

SEQ ID NO: 1600 - protein, 325 aa, Oryza sativa (indica cultivar-group)
MAPAAGDDAVVPRKGAGGGGTTTPPPPPPAQQQQQQPLPPPPPQEQGLRCPRCDSPNTKFCYYNNYSLSQPRHFCKTCRRYWTKGGALRNVPVGGGCRKNKRSRSAAAASRLSLNLPTGGAVGMLPLPRLQSPAGGGVGHHQYVPFGEWPSGDIAGGNAVNGGGGHGAVSSTIASSIESLSFINQDLHWKLQQQRLATMFLGPPGSASAAAAAAQANDGGGNGAQATASGHAAGGGGGAFMHMAGSVPSMEAAMPSATSWFMDSCSYGLPSPPPPATAAVAATTSSNLNSGGRSSGGGGGDDNATSNCGSAIPAWGDISTFAMLP

SEQ ID NO: 1601 - protein, 125 aa, Dubautia plantaginea
TNRQVTYSKRRNGIFKKAHELTVLCDAKVSLIMFSNTGKFHEYISPSTTTKKIYDMYQTTLGFDLWTSHYERMTETLKTLKESNNKLRREIRQRVLGEDLDGLDMNDLAILEQQMQDSLTVVRER

SEQ ID NO: 1602 - protein, 364 aa, Oryza sativa
MVTSKEFARDQAAMDQKIKSDVGEVVLAGDEEEDGDVVLPGFRFHPTDEELVTFYLRRKVARKSLSIEIIKEMDIYKHDPWDLPNASSGAVGGEKEWYFFCLRGRKYRNSIRPNRVTGSGFWKATGIDRPIYSAAVNSNSGESIGLKKSLVYYRGSAGKGTKTDWMMHEFRLPPAIAAADASPCMQEAEVWTICRIFKRSITYRKQQQQQAWRPPATVTVKAPPPGDSSSNTGSFESDGGGDEFMNCGLTPAISQQQQHGGRHQMMSTMSCNGGYFFNDGIHHSHSHHKLHSQWGSLQMAPPEPKPEPEQKPLSSPAMTIAFHQNDHGFPAAAADFYKDGYLEEIARMMEVADPSPTGFYDCRY

SEQ ID NO: 1603 - protein, 125 aa, Dubautia raillardioides
TNRQVTYSKRRNGIFKKAHELTVLCDAKVSLIMFSNTGKFREYISPSTTTKKIYDMYQTTLGFDLWISHYERMTETMKKLKESNNKLRREIRQRVLGEDLDGLDMNDLTILEQQMQDSLTVVRER

SEQ ID NO: 1604 - protein, 452 aa, Oryza sativa
MAAESSAAAAAGGGERRGPMDLNLYLGLPPLPPPPGRLDVAADYPSLLLNSAATVANEQRGSVVVAAPPPAAAAYSPSNALSAPEQVLVDPVAAWLVDPGEQQPVPPLETPSYMARASSTLPQIFACAALEMLVQTGGAIPPTGLIRGAEIAAASRPMTPENRLRRLIQVSDQHGVGNGRAGTGPVSRSRRANSPEADNLARAIQRSHNSLEASRRQMLDGDGSDATKKDDGCGCNGSFECNICFESAKDPVVTPCGHLFCWPCIYQWLHGHSEHSDCPVCKGEVLEVNVTPIYGRGGGEENSSRNDIQIPPRPSAQRTESLRQQLQRPDTRGGIANMVRRLMQNQDIVVGQAASSAPRPRGRGRRQARQDAPSAPATQQQVVNADAGSGNQAPLPPPDANGAAPAAAVAPQQSSSVEQASTSSTVGVIAGGPAQGRRSRVSESTPCARCSG

SEQ ID NO: 1605 - protein, 125 aa, Dubautia scabra
TNRQVTYSKRRNGIFKKAHELTVLCDAKVSLIMFSNTGKFHEYISPSTTTKKIYDMYQTTLGFDLWTSHYERMTETMKKLKESNNKLRREIRQKVLGEDLDGLDMNDLTILEQQMQDSLTVVRER

SEQ ID NO: 1606 - protein, 268 aa, Oryza sativa (japonica cultivar-group)
MGRGKVQLKRIENKINRQVTFSKRRNGLLKKAHEISVLCDAEVAAIVFSPKGKLYEYATDSRMDKILERYERYSYAEKALISAESESEGNWCHEYRKLKAKIETIQKCHKHLMGEDLESLNLKELQQLEQQLESSLKHIISRKSHLMLESISELQKKERSLQEENKALQKELVERQKNVRGQQQVGQWDQTQVQAQAQAQPQAQTSSSSSSMLRDQQALLPPQNICSYPPVMMGERNDAAAAAAVAAQGQVQLRIGGLPPWMLSHLNA

SEQ ID NO: 1607 - protein, 120 aa, Theobroma cacao
NPEFSSTLASHDDDNDDRATQGSISLCDDAANDDESESKRRKTESCLTEMNATSGALREPRVVVQIESDVDILDDGYRWRKYGQKVVKGNPNPRSYYKCTTPGCPVRKHVERASHNLKCV

SEQ ID NO: 1608 - protein, 218 aa, Eleusine indica
SKRRNGLLKKAYELSLLCDAEVALIIFSAGRGRLFEFSSSSCMYKTLERYRTYNFNSHEVKAPLDSEINYQDYLKLKTRVEFLQTTQRNILGEDLGPLSNKELEQLENQIEISLKQIRSRKNQMLLDQLFDLKSKEQELHDLNKGLKKKLKETCGENATHISWEEGGNSGTSRNANEPYQGILQHAENNSSLQIGYHQQAYMEQLNNQDIGAAHNPNE

SEQ ID NO: 1609 - protein, 385 aa, Medicago truncatula
MAASSSDPPSRHHTYDRKQKSLGLLCTNFLSLYNKDDVRLIGLDDAAAKLGVERRRIYDIVNVLESIGVLARKAKNQYTWKGFAAIPVALQELKEEGLWQNLNSSQEGANEDVKVSDEEDEDELLSQTTGSQGESLSQPTGSQNDNLNPNSAFPRSLKNDRREKSLALLTQNFVKLFVCSNLEMISLDDAARLLLGDAYNSSTMRTKVRRLYDIANVLTSMNLIEKTHTTDTRKPAFRWLGLKGKTLNEASLYNSKQNESRKRAFGNDVTNISFARNRMDLFMGGDFKKQKTMENDSGLCQEDVKQGIKQTSAANYQFGPFAPAFVSKAGSSENKVKQVHDWESLATEHCPQYQNQALKELYSHYMEAWKSWYSEVAGKRSTQVL

SEQ ID NO: 1610 - protein, 200 aa, Theobroma cacao
QVKGSEFPRSYYKCTHPNCEVKKLFERSHDGQITEIIYKGTHDHPKPQPSRRYSSGNIMPGQEERSDKVSSFTGRDGKGSSIYGQMAYSIEPNSTADLSPVTANDDNIDEVDDDDPFSKRRKMDGGVDITPVVKPIREPRVVVQTLSEVDILDDGYRWRKYGQKVVRGNPNPRSYYKCTNAGCPVRKHVERASHDPKAVI

SEQ ID NO: 1611 - protein, 338 aa, Brassica oleracea
MGRSPCCDQDKGVKKGPWVPEEDDKLTAYIEKNGYGNWRSLPKLAGLNRCGKSCRLRWMNYLRPDIRRGEFSDEEESTIVRLHALLGNKWSKIASHLPGRTDNEIKNYWNTHMRKKMLQMGIDPITHEPRTNDLSPILDVSQILAAAIGNGQFGNSNLINNNTALEDLLKLQLIHKMLQIITPKAIPNITSFTTNSLNPKLDSVVNSFTTNSVNPKPEQAAIQLNANEPHDFINQSANEDFMMPPFENIWDGFEDNQLPGLVTVSQKNLNSGTGMMPGYYGDQLSEIPSNGSISVSPETSGLNYPGTTQHLTGSDVLEDWEKFLDDETSHSCWKSFLE

SEQ ID NO: 1612 - protein, 234 aa, Theobroma cacao
QVKGSEYPRSYYKCTHPNCPVKKKVERSFDGQIAEIVYKGEHNHSKPQPPKRNSSGTQGLGFTSDGTGQDTNNSLWSNNPNERNEGSEGRVENQNEVGLSAPSSYQGKAVLSYEHVTTGAVNAGVTSENSIGLSGECEERSKEGEDDEPRSKRRKSENQSSEVGTSGEGIQEPRVVVQSCTDSEIMGDGFRWRKYGQKVVKGNPYPRSYYRCTSLKCNVRKHVERASDDPRAFI

SEQ ID NO: 1613 - protein, 171 aa, Triticum aestivum
  misc_feature (99)..(99): Xaa can be any naturally occurring amino acid
  misc_feature (118)..(118): Xaa can be any naturally occurring amino acid
  misc_feature (147)..(147): Xaa can be any naturally occurring amino acid
  misc_feature (157)..(157): Xaa can be any naturally occurring amino acid
MTFSISAAMDVGHGHEYMIRFDGHFEDPSPSTATAEPPPFAGRAISPEQEHGAMVAALLHVISGYTTPPPDFFPAAASKEVCPACKVDSCLGRAESDGXAGGPQRRRRNKKNKYRGVXQRPWGKWAAEIRDPRRAVRVWLGTFDTAXDAARAYDRAXVEFRGPRAKLNFPF

SEQ ID NO: 1614 - protein, 197 aa, Arabidopsis thaliana
MPTLYKKAGCQFQLTTMSCNNGMSFFPSNFMIQTSYEDDHPHQSPSLAPLLPSCSLPQDLHGFASFLGKRSPMEGCCDLETGNNMNGEEDYSDDGSQMGEKKRRLNMEQVKTLEKNFELGNKLEPERKMQLARALGLQPRQIAIWFQNRRARWKTKQLEKDYDTLKRQFDTLKAENDLLQTHNQKLQAEIMGLKNRE

SEQ ID NO: 1615 - protein, 352 aa, Solanum demissum
MEVETHMSFRTAEKISILVVNDDATYLPVVAGLLKKCNYQVVTVKYPIDALSKLRIKGDSFDLVVTDVHKSDINGFELQQVITQAFEIPVLLMSADDKEGTILKGLKGVSVDDQRDQGPCTALQVKRGKKPVPGKSAMKLGKQGKDNSVNFVLPTKSQIIWTDSLHNTFLEAISNIGFDKAVPKKIHEHMKVPGLSRENVASHWQKYRIYLRRVTDASSSIQVPDINLASRANQSTIASGTLGKHRQFHQENFGVQSSVPSLLIHTTGYRTGSLQHLKNKGKEVDDVLDPVRNFSVFHNVSATQGSQGIGDLSASSMNQGNDQPHQQNNEDEALVNFDGGFNQDMEKEDYLQ

SEQ ID NO: 1616 - protein, 329 aa, Triticum aestivum
MGMPAVRRRERDAEAELNLPPGFRFHPTDDELVEHYLCRKAAGQRLPVPIIAEVDLYRFDPWALPDRALFGTREWYFFTPRDRKYPNGSRPNRAAGNGYWKATGADKPVAPRGGRTMGIKKALVFYAGKAPKGVKTDWIMHEYRLADAGRAAASKKGSLRLDDWVLCRLYNKKNEWEKMQLQQQGEEETMMEPKAENTASDMVVTSHSHSQSQSHSHSWGEARTPESEIVDNDPSLFQQATAAAFQAQSPAAAAAHQEMMATLMVPKKEAADEAGRNDLFVDLSYDDIQSMYNGLDMMPPGDDLLYSSLFASPRVRGSQPGAGGMPAPF

SEQ ID NO: 1617 - protein, 245 aa, Lolium temulentum
MGRGKVQLKRIENKINRQVTFSKRRSGLLKKAHEISVLCDAEVGLIIFSTKGKLYEFATDSCMDKILERYERYSYAEKVLISTESEIQGNWCHEYRKLKAKVETIQRCQKHLMGEDLESLNLKELQQLEQQLESSLKHIRSRKSQLMHESISELQKKERSLQEENKILQKELIEKQKAHTQQAQLEQTQPQTSSSSSSFMMGEATPATNRSNPPAAASDRAEDATGQPPARTVLPPWMVSHLNNG

SEQ ID NO: 1618 - protein, 196 aa, Arabidopsis arenosa
MGSKKLEIKRIENKSSRQVTFSKRRNGLIEKARQLSVLCDASVALLVVSASGKLYSFSSGDNLVKILDRYGKQHADDLKALDIQSKALNYGSHHELLELVESKLVGSNVKNVSVDTLVQLEEHLGTALSVTRAKKTELMLKLVENLKEKEKLLKAENQVLASQMKKNHHVGAEAEMEISPAGQISDNLPVTLPLLN

SEQ ID NO: 1619 - protein, 261 aa, Lolium temulentum
MGRGKVQLKRIENKINRQVTFSKRRNGLLKKAHEISVLCDAEVAVVVFSPKGKLYEYATDSSMDKILERYERYSYAEKALISAESESEGNWCHEYRKLKAKIETIQKCHKHLMGEDLECLNLKELQQLEQQLESSLKHIRSRKSHLMMESISELQKKERSLQEENKALQKELVERQKAARQQQQEQWDRQTQTQQAQNQPQAQTSSSSSSFMMRDQQAHAQQNICYPLVTMGGEAVAAAPGQQGQLRIGGLPPWMLSHLNA

SEQ ID NO: 1620 - protein, 269 aa, Zea mays
MAPQSLDLGLSLGLGVAAFQPSFCHPAGNDAAEREASPTADERERRCSPAGSPTSSGSGKRVAAERSAGSGSGDEDDDGGARKKLRLSKDQAAVLEECFKTHHTLTPVLSVSALQKQKAALASRLGLRARQVEVWFQNRRARTKLKQTEVDCEYLRRWCEQLAEENRRLGKEVAELRALSAAPAPAAPLTALTMCLSCRRVSSSSCSSSPPNTHAHAAAAGTGRSVAAAAATTLPAHRQFLCGFRDGGAAAAAVYGTSSALAKALRAAR

SEQ ID NO: 1621 - protein, 98 aa, Glycine max
HEERCCENLTEENRRLQKEVQELRALKLSPQFYMQMSPPTTLTMCPSCERVAVSSSAVGSATRHHPMAHAHAHARPMPNGPWASAAPIPHRPFDAFHQ

SEQ ID NO: 1622 - protein, 125 aa, Argyroxiphium caliginis
TNRQVTYSKRRNGIFKKAHELTVLCDAKVSLIMFSNTGKFHEYISPSTTTKKIYDMYQTTLGFDLWSSHYERMTETMKKLKDSNNKLRREIRQRVLGEDLDGLDMNDLTTLEQQMQDSLTVVRER

SEQ ID NO: 1623 - protein, 125 aa, Argyroxiphium sandwicense
TNRQVTYSKRRNGIFKKAHELTVLCDAKVSLIMFSNTGKFHEYISPSTTTKKIYDMYHTTLGFDLWSSHYERMTETMKKLKDSNNKLRREIRQRVLGEDLDGLDMNDLTILEQQMQDSLTVVRER

SEQ ID NO: 1624 - protein, 125 aa, Dubautia laevigata
TNRQVTYSKRRNGIFKKAHELTVLCDAKVSLIMFSNTGKFHEYISPSTTTKKIYDMYQTTLRFDLWSSHYERMTETMKKLKDSNNKLRREIRQRVLGEGLDGLDMNDLTILEQQMQDSLTVVRER

SEQ ID NO: 1625 - protein, 242 aa, Brassica oleracea var. botrytis
MGRGRVQLKRIENKINRQVTFSKRRSGLLKKAHEISVLCDAEVALVVFSSKGKLFEYSTDSSMERILERYDRYLYSDKQLVGRDISQSENWVLEHAKLKARVEVLEKNKRNFMGEDLDSLSLKELQSLEHQLDAAIKSIRSRKNQAMFESISALQKKDKALQDHNNTLLKKIKEKEKEKNTGQQEGQLIQCSNNSSVLQPQYCVTSSRDGLVERVGGENGGTSSLIEPNSLLPAWMLRPTTK

SEQ ID NO: 1626 - protein, 275 aa, Oryza sativa (japonica cultivar-group)
MGGNQEYMIRFDGHIDDASPSSATAEPPPPLPPPRPFAGRAISAEREHSVIVATLLHVISGYRTPPPEVFPAARAEVCGVCGMDQCLGCEFFAGESGVVSFDGAEKVAAAAAAAAAGAAAGQRRRRKKKNKYRGVRQRPWGKWAAEIRDPRRAVRKWLGTFDTAEEAARAYDRAAVEFRGPRAKLNFPFPEQLSAHDDSNGDASAAAKSDTLSPSPRSADADEQVEHTRWPQGGGGGGGGGGGETGDQLWEGLQDLMQLDEGGLSWFPQSSDSWN

SEQ ID NO: 1627 - protein, 229 aa, Oryza sativa
  misc_feature (54)..(54): Xaa can be any naturally occurring amino acid
MSSASSMEALHAAVLKEEQQQHEVEEATVVTSSSATSGEEGGHLPQGWAKRKRXAPPPLSASAPPPAGAEFKCSVCGKSFSSYQALGGHKTSHRVKLPTPPAAPVLAPAPVAALLPSAEDREPATSSTAASSDGMTNRVHRCSICQKEFPTGQALGGHKRKHYDGGVGAGAGRIFNRAPGQSATRAFDLNLPAVPEFVWRPCSKGKKMWDEEEEVQSPLAFKKPRLLTA

SEQ ID NO: 1628 - protein, 270 aa, Hordeum vulgare subsp. vulgare
LKKPDKILPCPRCSSMDTKFCYYNNYNINQPRHFCKNCQRYWTAGGAMRNVPVGAGRRKSKSISAASHFLQRIRAALPGDPLCTPVNTNGTVLSFGSDASTLDVVSEQMKHMKELSSVTRTENTDAPSVGSCAEGWAKGEESSQMNSRERVAADRSPNFAQHPCMNGAAMWPFSCAPSPAYFTPNVAIPFYPAAAAAYWGCMVPGAWNTPWQPQPQPQSQCQSSSPPSAASPVSTMSSCFQSRKHPRDGDEERDTKGNGKVWVPKTIEST

SEQ ID NO: 1629 - protein, 440 aa, Zea mays
  misc_feature (56)..(56): Xaa can be any naturally occurring amino acid
MDSDYIASLLMGMGSSAPALDFAALDAGFLDTLRGGGGGGLFGVPAEAGCGGGSPXGSSVSDPAWARARDYGNARKRKAPPTGSAGGKEACLSKVAEAKGPDGKRCRVVGASDSPVKPKEEEEEAAASDALVEVKAQKKGKGKSSKPAVEPPKDYVHVRARRGQATDSHSLAERVRREKISQRMKFLQDLVPGCNKVVGKALMLDEIINYVQSLQQQVEFLSMKLATVNPQLDFSNLSTLLHKDADLFHSFGSGGSGSGSGMEDQCSLSLLLDTALPHAANPQFAFQKQQRDFWEDGLQNALPTGSEQRQEEDGLLVPNFDVLMIMMTKVQVSSQLVAIVSVSWPAWCSEIVNFIQKRQLNTQAAARFRVVVLGTGPSLPGDKPFDAMACLDASSCHGGGRLMGTGAGSARALAVAFAVSLLACSGAVAVARAQDTERIE

SEQ ID NO: 1630 - protein, 333 aa, Triticum aestivum
  misc_feature (174)..(174): Xaa can be any naturally occurring amino acid
  misc_feature (180)..(180): Xaa can be any naturally occurring amino acid
  misc_feature (211)..(211): Xaa can be any naturally occurring amino acid
  misc_feature (278)..(278): Xaa can be any naturally occurring amino acid
  misc_feature (292)..(292): Xaa can be any naturally occurring amino acid
  misc_feature (300)..(300): Xaa can be any naturally occurring amino acid
  misc_feature (302)..(302): Xaa can be any naturally occurring amino acid
  misc_feature (320)..(320): Xaa can be any naturally occurring amino acid
  misc_feature (328)..(328): Xaa can be any naturally occurring amino acid
MKIQCNACGAAEARVLCCADEAALCAACDEEVHAANRLAGKHQRVPLLPDAAAPPKCDICQEASGYFFCLEDRALLCRDCDVAIHTVNSFVSAHQRFLLTGVQVGLDPADPLPPVADKHVNTSGGSVDSLPKHLPKKNPTALFSGENSASIPSANAISGDYSRQISVPNTKTGXTNWTMXNSALRLAEPPPKYLSDGNSKLLPSNQTTTAXSNQLTRDRGRAYNLPFSGGNGSDSLPDWPVDEFFSNLEYGPNFGFTEHGSSKGDNAKLGSAGGSPQXCRLAEGLFAEDLLXQVPGFDAXDXWVVPEVPPQQQAQGLCWXGTSLPVFXSPCCP

SEQ ID NO: 1631 - protein, 210 aa, Asarum caudigerum
NRQVTYSKRRGGIFKKAKELTVLCDAQVSLIMFSGTGKFSEYFSPSTTTKQIYDKYQEASGINLWSSHYEKMQNLLNKLKDDNNKLRREIRQRIGEDLSGLEIEELRGLEQNLESSVKVVRDKKYQVITRQTDTNKKKVRSLVQTHKDLGCALAGKDAICDYGLAYNESLGCKSELGLANDASHIFAFRIQPCQPNLHNTGYGIHDLRLA

SEQ ID NO: 1632 - protein, 222 aa, Hordeum vulgare subsp. vulgare
MDKHQLFDSSNVDTTFFAANGTAQGDTSKQRARRRRRRSARCGGGDGDGGEMDGGGDPKKRRLTDEQAEILELSFREDRKLETARKVYLAAELGLDPKQVAVWFQNRRARHKNKTLEEEFARLKHAHDAAILHKCHLENELLRLKERLGATEQEVRRLRSAAGSHGASVDGGHAAGAVGVCGGSPSSSFSTGTCQQQPGFSGADVLGRDDDLMMCVPEWFLA

SEQ ID NO: 1633 - protein, 295 aa, Zea mays
MSGAGPDLQLPPGFRFHPTDEELVMHYLCRRCAGLPIAVPIIAEIDLYKFDPWQLPRMALYGEKEWYFFSPRDRKYPNGSRPNRAAGAGYWKATGADKPVGTPKPLAIKKALVFYAGKAPKGEKTNWIMHEYRLADVDRSARKKNSLRLDDWVLCRIYNKKGGGLEKAAAPAAGGDHKPVFATAAVSSPPEQKPFVAAAGGLPPAFPELAAYYDRPSDSMPRLHADYSSCSEQVLSPEQLACDREVQSQPKISEWERTFASDPVNPAGSMLDPVVGHAGGDPLLQDILMYWGKPF

SEQ ID NO: 1634 - protein, 182 aa, Asarum caudigerum
KAHEISVLCDAEVGLIVFSPRGKLYEFANSSMLKTIERYQRHSKEANVNNKATEQNIQHWKYEAEHMAKKIEFLESSKRKLLSEDLESCSTEELQQIESQLERSLSSIRGKKNQLFKEQIEQLKEKEKILIKENAILSQKCGTQPQQQSTSPSGTVPYEHIFPHSEVETDLFIGRPERGSTR

SEQ ID NO: 1635 - protein, 410 aa, Arabidopsis thaliana
MAETMKDITMKNDESQEEEIPDQFLCCVCLELLYKPIVLSCGHLSCFWCVHKSMNGFRESHCPICRDPYVHFPSVCQKLYFLLKKMYPLAHKKREEQVLKEEQERECFSPQIDLVLDLSVCSGDSLNVSDKQKVEECSNAANLLSSSSSRGDIPCIPKNQEPTDAKALNVHENELLKDNKVSKQISKDDLLCSACKELLVRPVVLNCGHVYCEGCVVDMAEESEKIKCQECNVCDPRGFPKVCLILEQLLEENFPEEYNSRSSKVQKTLAHNSKGNIQSYLKEGPSLSNDNNNDDPWLANPGSNVHFGAGCDSCGVYPIIGDRYRCKDCKEEIGYDLCKDCYETPSKVPGRFNQQHTPDHRLELARSPQVLINFNSIGILLGPVISNEGMDTDEGEEGPPGSSNESSSTE

SEQ ID NO: 1636 - protein, 211 aa, Asarum caudigerum
NRQVTYSKRRNGLLKKAYELSVLCEAEVALIVSSSRGRLYEYANNSVRTTIDRYKKASDSSNPASVSETNSQYYQQEATKLRQQIDILQNANRQLMGESISAMNVKQLKQLETRLEKGISRIRSKKNELLFAEIEYMQKREVELRNDNIYLRGKIVENERAQQNMNMLPGGGGYEVMSQHPSYDSRNYLPVNLLEHNQHFSHQEPTALQLG

SEQ ID NO: 1637 - protein, 365 aa, Gibberella zeae
MSSSSTTTTTSPYPFATAPDIIRSHQKDAYFTGHLAQILSDLYRRLRGARLTHTRAPEIQTLAALAYFALTTIPGNRTLGEEYCDLVQIDARDGQLPAVYRRAGYVAASILLPYIAARVLPGLRAQVRKLLQRRLETLRKRDGQSATGREARIWSYLEQHLSSFTSGAPFQAVILALFYFSGTYYQLSKRLLSLRYVFTRTVPDTPDRAGYELLGVLLVVQLAVQSYSHIRSTITESAARERAAFGSSDDISLNHDGAYNQDNNLLLSTGAPGSKTKVDIFAATHTPAATVPRLQLTDDKTMGYIKGGQQRKCTLCLEEMKDPSATQCGHVFCWECIGDWVREKPECPLCRREAMAQHILPLRVM

SEQ ID NO: 1638 - protein, 118 aa, Citrullus lanatus
  misc_feature (58)..(58): Xaa can be any naturally occurring amino acid
  misc_feature (84)..(84): Xaa can be any naturally occurring amino acid
  misc_feature (89)..(89): Xaa can be any naturally occurring amino acid
  misc_feature (99)..(99): Xaa can be any naturally occurring amino acid
DLTPRQVEVWFQNRRARTKLKQTEVDCEYLKRCCENLTEENRRLQKEVQELRALKLSXQLYMHMNPPTTLTMCPQCERVAVSSXSSASXATTTRHPAAXSVQRPSMAINPWAVLPIQR

SEQ ID NO: 1639 - protein, 319 aa, Pimpinella brachycarpa
MMVQERDELGLSLSLSFPGSSHEQNKSNTTNNKHNQMPHASTPLELNLMPSQPLNLLHNNTTTTWTHPASHDRKMEACRVDRRSLLTGIDVNRIPAMTVDMEEETGVSSPNSTISSLSGNKRSLVNERSELANGDEILECSRSDDEDGDNSRKKLRLTKDQSAILEESFKEHNTLNPKQKIALAKRLGLRPRQVEVWFQNRRARTKLKQTEVDCEFLKRCCQTLTEENRKLQKEVQELRALKSSPQFYMQMTPPTTLTMCPSCERVGGLQSATTTSSAGPSITQAEPLRSHPMNSNHHRLPFNPWASPQRPLDALHPRS

SEQ ID NO: 1640 - protein, 125 aa, Dubautia latifolia
TNRQVTYSKRRNGIFKEADELTVLCDAKVSLIMFSNTGKFHEYISPSTTTKKIYDMYQTTLGFDLWGSHYERMTETMKKLKDSNNKLRREIRQRVLGEDLDGLDMNDLTILEQQMQDSLTVVRER

SEQ ID NO: 1641 - protein, 227 aa, Capsella rubella
RGKIEIKRIENTTNRQVTFCKRRNGLLKKAYELSVLCDAEVALIVFSSRGRLYEYSNNSVKGTIERYKKAISDNSNTGSVAEINAQYYQQESAKLRQQIISIQNSNRQLMGETIGSMSPKELRNLEGRLERSITRIRSKKNELLFSEIDYMQKREVDLHNDNQILRAKIAENERNNPSISLMPGGSNYEQLMPPPQTQPQPFDSRNYFQVAALQPNNHHYSSAGGRQ

SEQ ID NO: 1642 - protein, 125 aa, Dubautia laxa
TNRQVTYSKRRNGIFKKAHELTVPCDAKVSLIMFSNTGKFHEYISPSTTTKKIYDMYQTTLGFDLWSSHYERMTETMKKLKDSNNKLRREIRQRVLGGDLDGLDMNDLTILEQQMQDSLTVVRER

SEQ ID NO: 1643 - protein, 226 aa, Capsella bursa-pastoris
RGKIEIKRIENTTNRQVTFCKRRNGLLKKAYELSVLCDAEVALIVFSSRGRLYEYSNNSVKGTIERYKKAISDNSNTGSVAEINAQYYQQESAKLRQQIISIQNSNRQLMGETIGSMSPKELRNLEGRLERSITRIRSKKNELLFSEIDYMQKREVDLHNDNQILRAKIAENEKNNPSISLMPGGSNYEQIMPPPQTQPQPFDSRNYFQVAALQPNNHHYSSAGRQ

SEQ ID NO: 1644 - protein, 299 aa, Zea mays
  misc_feature (241)..(241): Xaa can be any naturally occurring amino acid
  misc_feature (274)..(274): Xaa can be any naturally occurring amino acid
  misc_feature (285)..(285): Xaa can be any naturally occurring amino acid
MGSQTIASQAGGGGRGMGSSGGAGAAQRGQMQSLARQGSLYNLTLDEVQSHLGEPLHSMNLEELLKSVFPDDLDPDGGTTSQYEQSSGLLRQGSITMPPELSRRTVDEVWKDIQDAPNRNVGESGRRKRERQPTLGEMTLEDFLVKAGVVAEGYLKDLNGIGSVEQVGSTGAAGLTAGAQWLDHYQQRITAIEPHQHRQHSLPGAYIPGQLSLHSLNVGPSAILESYSDGHISSPMRGAFXDSPMPGRKRGSPGDVTDKLMARRKKRMIKNREXASRSRGRKQAXPNELHNKVTRLEEE

SEQ ID NO: 1645 - protein, 125 aa, Dubautia raillardioides
TNRQVTYSKRRNGIFKKAHELTVLCDAKVSLIMFSNTGKFHEYISLSTTTKKIYDMYQTTLGFDLWSSHYERMTETMKKLKDSNNKLRREIRQRVLGEDLDGLDMNDLTILEQQMQDSLTVVRER

SEQ ID NO: 1646 - protein, 226 aa, Capsella bursa-pastoris
RGKTEIKRIENTTNRQVTFCKRRNGLLKKAYELSVLCDAEVALIVFSSRGRLYEYSNNSVKGTIERYKKAISDNSNTGSVAEINAQYYQQESAKLRQQIISIQNSNRQLMGETIGSMSPKELRNLEGRLERSITRIRSKKNELLFSEIDYMQKREVDLHNDNQILRAKIAENERNNPSISLMPGGSNYEQIMPPPQTQPQQFDSRNYFQVAALQPNNHHYSSAGRQ

SEQ ID NO: 1647 - protein, 331 aa, Oryza sativa (japonica cultivar-group)
MREEEEPSWFARWEEQLPAPDELMPLSQSLITPDLAVAFDIPTHGGGGGGGVGGGVVGGDGVGGGGGGGGGGGGGVGAGEMNGGASSAAGSSGGGGGGGGGDEPARTLKRPRLVWTPQLHKRFVDAVAHLGIKNAVPKTIMQLMSVDGLTRENVASHLQKYRLYLKRMQGVGNGGGGGGGGGAGAGGSHSSGSGTDAATEHLFATGPVPFLPPGRAPAGGDPYPPFAPMGGHHHHPPQIGHFHHHPAARPLGHYGSGPGAGFDHGFLSRAVAGGGPPVGPPGMHHRMVGPAAGMAMMAPSPFAEELELGSRGGGGGGGRRELTLFPTTGDH

SEQ ID NO: 1648 - protein, 125 aa, Dubautia scabra
TNRQVTYSKRRNGIFKKAHELTVLCDAKVSLIMFSNTGKFHEYISPSTTTKKIYDMYQTTHGFDLWSSHYERMTETMKKLKDSNNKLRREIRQRVLGEDLDGLDMNDLTILEQQMQDSLTVVRER

SEQ ID NO: 1649 - protein, 239 aa, Oryza sativa (japonica cultivar-group)
MGGGGGGGEKGEGEEMEEEEEVPQRRRRGQGADVESSRGFRHMMRERQRREKLSQSYADLYAMVSSRSKLQNVRNPPLIPLKWSVYQNRADKKPFVSLQGDKNSIVQSAAIYIHELKVARDQLQRRNEELKAQIMGHDEQQPCVTVQFEVDEPSSSIDSMIAALRRLKGMSVKARGIRSSMSGNRLWTEMNVETTIAACEVEKAVEEALKEVERNQPDSDAPFPGSKGWTQTSHVQNVF

SEQ ID NO: 1650 - protein, 273 aa, Oryza sativa
  misc_feature (104)..(104): Xaa can be any naturally occurring amino acid
EEGEEELVGGDYEGREAEGSDEVVSRREQRYIVLTEKDINERQEEDIGKVSAVLSIRREEACVLLHHYKWNISKLSDEWFADEEKVRDIVGLLLNGIDLPNSRXGYSSDAMSSAGCAHFYCHECWEGYISAAISDGPGCLSLRCPDPSCGAMVLQNMINKLAKDDDKVRYARFILRAYVEDSKKTKWCPAPDCTCAVEFVSDGNYDVSCNCKFSFCWNCTEEAHRPVNCETVSRWILKNSAESENMNWILANSKPCPKCKRPIEKNQGCMHMT

SEQ ID NO: 1651 - protein, 256 aa, Impatiens balsamina
MADLPSESMELLDISGQRKNGRGKIEIKRIENTTNRQVTFCKRRNGLLKKAYELSVLCDAEVALVVFSSRGRLYEYANNSVRGTIERYKKASSDTPNTAGSVAEANAQFYQQESSKLRQQIGNLQNSNRQILGESLSSMNLRDLKSLESRLERSISKIRSKKNELLFAEIDFMQKREVDLHNNNQFLRAKISESERAQQQQQHQQTQINLMPGGSNYELVQSQAQTSFDNRNFFQVTALQPDNQYSRDDQTPFQLV

SEQ ID NO: 1652 - protein, 125 aa, Dubautia sherffiana
TNRQVTYSKRRNGIFKKAHELTVLCDAKVSLIMFSNTGKFHEYISPSTTTKKIYDMYQTTLGFDLWSSHYERMTETMKKLKDSNNKLRREIRQRVVGEDLDGLDMNDLTILEQQMQDSLTVVRER

SEQ ID NO: 1653 - protein, 443 aa, Glycine max
TSSGSVSNASSESQSLRLNDNVSEHEVGNGSGNPYYHHRKVEAGEEDDHHGFELVSLLTGCVDAIGSRNVTAINHFIAKLGDLASPKGTTSISRICAYFTEALAIRVTRLWPHVFHIAAATTSRDMVEDDESATALRLLNQVTPIPRFLHFTSNEMLLRAVEGKDRVHIIDFDIKQGLQWPSLFQSLASRSNPPIHVRITGIGESKQDLNETGERLAGFAEVLNLPFEFHPVVDRLEDVRLWMLHVKEHETVAVNCVLQLHKTLYDGSGGALRDFLGLIRSTNPSVVVVAEQEAEHNENRLEGRVCNSLKYYSALFDSIDESGLPQESAVRVKIEEMYAKEIRNIVACEGRERVERHESFGNWRRMMVEQGGFRCMGVTERELSQSQMLLKMYSCESYSVKKQEKEGATGVTLSWLEQPLYTVSAWGPVDAAAGTSSSFSQPS

SEQ ID NO: 1654 - protein, 288 aa, Arabidopsis thaliana
MSFFPSNFMIQTSYEDDHPHQSPSLAPLLPSCSLPQDLHGFASFLGKRSPMEGCCDLETGNNMNGEEDYSDDGSQMGEKKRRLNMEQVKTLEKNFELGNKLEPERKMQLARALGLQPRQIAIWFQNRRARWKTKQLEKDYDTLKRQFHTLKAENDLLQTHNQKLQAEIMGLKNREQTESINLNKETEGSCSNRSDNSSDNLRLDISTAPPSNDSTLTGGHPPPPQTVGRHFFPPSPATATTTTTTMQFFQNSSSGQSMVKEENSISNMFCAMDDHSGFWPWLDQQQYN

SEQ ID NO: 1655 - protein, 174 aa, Arabidopsis thaliana
MAYEKVNELNLKDTELCLGLPGRTEKIKEEQEVSCVKSNNKRLFEETRDEEESTPPTKTQIVGWPPVRSSRKNNNSVSYVKVSMDGAPYLRKIDLKTYKNYPELLKALENMFKVMIGEYCEREGYKGSGFVPTYEDKDGDWMLVGDVPWDMFSSSCKRLRIMKGSDAPALDSSL

SEQ ID NO: 1656 - protein, 355 aa, Oryza sativa (indica cultivar-group)
MGAYDRPPPVGMWSHEQFKVDNGQATSASTIMEAEMKFENRLEEIPQVVLEEGRNVDQEASKPPDKVLRRLAQNREAARKSRLRKKAYIQQLETSRLKLAQLEQELQRARQQAVYANGSLREPNLGFTGPIDPGALGFEIKYSHWVDEQNRNTGELRNALLQGQTTDQDLELKLLVEAGLDNYNRLFEMKEEAANSDVFYIMSGMWKTPTERFFLWIGGFRPSEVLKNLRPQLEPLTDKQVVEVGGLQQTSMQVEDALSQGMDKLKQTIADSLTAADPFDSPEAYMVHMANAVEQLRSLVQFVTQADHLRQQTLQEMHRILTTRQAARGLLALGDYFQRFRALSSLWAARPRDSG

SEQ ID NO: 1657 - protein, 202 aa, Solanum demissum
MTTSSSDAPCVDHNQKSKNQDKKQQEAKKPTTTKDRHTKVDGRGRRIRMPATCAARVFQLTRELGHKSDGETIEWLLQQAEPAVIAATGTASHQIGHIPATTLYMMTNNNNNTSHHDPNNCSMWASPSNNNIENSNIRGGLLNFMNFHQPILGTRGGGGGGTAAEGQWGMLTAAMNSYRQSGGHASGSSNQHNGGDDHQHHS

SEQ ID NO: 1658 - protein, 210 aa, Asarum caudigerum
NRQVTYSKRRGGIFKKAQELTVLCDAQVSLIMFSSTGKFSAYCSPSTTTKQIYDKYQEASGINLWSSHYEKMQNLLNKLKDDNNKLRKEIRQRIGEDLSGLEIEGLRGLEQNLESSLKVVRDKKYQVISSQTDTKRKKVKSLEQTHKDLGCSLAGKDAICDYGIAYNETLDYKSVLGLANDASHIFAFRIQPCQPNLHNAGYGIHDLRLA

SEQ ID NO: 1659 - protein, 205 aa, Oryza sativa (japonica cultivar-group)
MAPAAGGFKLFGKVIMQCGVSEGTQDKAQGFVVAREKVEPEEEEEEEQRVPAAATSGQRASIKREAADRDEEQRQGGGDAAGQPTQRRLQDSAEARAAAAAPLPCPRCRSRDTKFCYFNNYNVNQPRHFCKACHRYWTAGGALRNVPVGAGRRKNRPLGPLAVAHHNHHHRAAAGFVLGFPNPSSPTSPSPVYTDRWPVTPDRPF

SEQ ID NO: 1660 - protein, 476 aa, Triticum aestivum
  misc_feature (232)..(232): Xaa can be any naturally occurring amino acid
MAALRDRGDAAIKLFGRTIPLLDAAAEVVTKLGNDANSNDVMPCVSNKLLNVEATPFCSKNREQNDQAISKHGVEVRTGFKSEEIKTGSDGSGQDKVLKKPDIIVPCPRCNSMETKFCYFNNYNVSQPRHFCRNCQRYWTAGGNIRNVPVGSGRRRNKHASHFRHAMMSCDANIAAPGDVSNEIHHLALPLLPQVLPGPIKENKTVKEFGSQVPVCKPMSSIHNIEEQKDTXLLPWASGDNSEEQSCPSPATVSGCSENQTPDSAVKKEPSNVLGYYNGITLPHPHGPALVFPWSPGWNSIAVMAAAQCSTEPIQGLENVKHGLPPWAPPLMMAAPGICTPVVPFPMMPPPLWSCIPGWPNGMWSSPCPGNNGPPNKITCSEDNSPTLGKHSRESDLQEENRENNVQVPKTLRIDDPSEATKSSVRDTLGIKPDEKGLFEPLQMKVLKNDKTPESPQALQANPAAFLRSQSFQERT

SEQ ID NO: 1661 - protein, 213 aa, Sinapis alba
MVRGKTQMKRIENATSRQVTFSKRRNGLLKKAFELSVLCDAEVSLIIFSPKGKLYEFASSNMQDTVDRYLRHTKDRVSSKPVSEENMQHFKHEAANMMKKIEQLEASKRKLLGEGIGSCSIEELQQIEQQLEKSVKCVRARKTQVFKEQIEQLKQKEKALAAENEKLAEKWGSHEIEVWSNKKQESGRGDEESSPSSEVETQLFIGLPCSSRK

SEQ ID NO: 1662 - protein, 96 aa, Daucus carota
LGEKKRRLNLEQVKALEKSFELGNKLEPERKVQLARALGLQPRQIAIWFQNRRARWKTKQLERDYTILKRQFDALKADNDSLRTQNKKLHGELLAL

SEQ ID NO: 1663 - protein, 259 aa, Oryza sativa (japonica cultivar-group)
MEPSSQPQPVMGVATGGSQAYPPPAAAYPPQAMVPGAPAVVPPGSQPSAPFPTNPAQLSAQHQLVYQQAQQFHQQLQQQQQQQLREFWANQMEEIEQTTDFKNHSLPLARIKKIMKADEDVRMISAEAPVVFAKACEVFILELTLRSWMHTEENKRRTLQKNDIAAAITRTDIYDFLVDIVPRDEMKEEGLGLPRVGLPPNVGGAADTYPYYYVPAQQGPGSGMMYGGQQGHPVTYVWQQPQEQQEEAPEEQHSLPESS

SEQ ID NO: 1664 - protein, 529 aa, Gibberella zeae
MDSDEEYMSALSTDDEIMQDDSGDEISAGDDFDDEEFDEPDPDFGLAKDVEKKKRAAHVVSYKVYEPSDIQSQQDEMIGEVNMILDMQKEDAAILLRHFRWNKERLLEDYMDRPEKVMEAAGLSSTTSSSPKLEVIPGFVCDICCEDDDGLESFAMKCGHRYCVDCYRHYLTQKIREEGEAARIQCPSDGCGRILDSASLDVLVTPALAGRYQELLNRTYVEDKDNFKWCPAPDCPNALECGVKKKDLGRIVPTVECRCGFRFCFGCPNPDHQPAPCDLVKKWLKKCADDSETANWISANTKECPKCNSTIEKNGGCNHMTCRKCKYEFCWMCMGLWSEHGTSWYNCNRYEEKSGSEARDAQAKSRTSLERYLHYYNRYANHEQSAKLDKDIAQKTEKKMVQLQSASGMSWIEVQYLNSASQALQTCRQTLKWTYAFAFYLARNNLTEIFEDNQKDLEMAVENLSEMFEKPITELSDPKLKVDIMDKTSYCNKRRVILLEDTAENLANGEWNFNADLLAATTSAPVHRR

SEQ ID NO: 1665 - protein, 265 aa, Arabidopsis thaliana
  misc_feature (202)..(202): Xaa can be any naturally occurring amino acid
MALDVAFGGHRSLSSSSSPSVEDEKKKPAPRTKTSDEFRVSSSVDPPLQLQLHFPNWLPENSKGRQGGRIPLGAATVVEEEEEEEEAVPSMSVSPPDSVTSSFQLDFGIKSYGYERRSNKRDIDDEVERSASRASNEDNDDENGSTRKKLRLSKDQSAFLEDSFKEHSTLNPKQKIALAKQLNLRPRQVEVWFQNRRARTKXELRTLKTSTPFYMQLPATTLTMCPSCERVATSAAQPSTSAAHNLCLSTSSLIPVKPRPAKQVS

SEQ ID NO: 1666 - protein, 319 aa, Oryza sativa
MMASCRRGGGGDVDRIKGPWSPEEDEALQRLVGRHGARNWSLISKSIPGRSGKSCRLRWCNQLSPQVEHRPFTPEEDDTILRAHARFGNKWATIARLLAGRTDNAIKNHWNSTLKRKHHSSLLADDLRPLKRTTSDGHPTLSSAAAPGSPSGSDLSDSSHHSLPSQMPSSPPHLLLPQHVYRPVARAGGVVVPLPPPPPPPATSLSLSLSLPGLDHPHPDPSTPSEPAVQLQPPPPSQMPPPTPSCVRQEPPQMPFQLQPPPPPRPSAPFSAEFLAMMQEMIRIEVRNYMSGSAAVDPRSSPDNGVRAASRIMGMAKIE

SEQ ID NO: 1667 - protein, 195 aa, Triticum turgidum subsp. durum
MTVDRKDAEAAAAAAAPFEIPALQPGRTCGAEESTRSHVLVKPIGSSKLPCNEYALLARQNPKGDALPVPSILRKKRPRRSRDGPNSVSETIRRWKEVNQQLEHDPQGAKRARKPPAKGSKKGCMQGKGGPENTQCGFRGVRQRTWGKWVAEIREPNRVSRLWLGTFPTAEDAARAYDEAARAMYGALARTNFPV

SEQ ID NO: 1668 - protein, 224 aa, Brassica oleracea var. botrytis
MARGKIQIKRIENQTTGQVTYSKRRNGLFKKAHELTVLCDARVSIIMFSSSNKLHEFISPNTTTKEILDLYQTVSDVDVWNAHYERMQETKRKLLETNRNLRTQIKQRLGECLDEFDIQELCSLEEEMENTFKLVRERKFKSLGNQIETTKKKTRASKTYKKNLIHELELRAEDPHYGLVDNGGDYDSVLGYQLRFHQNHHHHYPNHALHEASASDIITFHLLE

SEQ ID NO: 1669 - protein, 236 aa, Glycine max
MFQESSATRWPTQPTQWTRYHDKLFERALLVVPEDLPDRWEKIADQVPGKSAVEVREHYEALVHDVFEIDSGRVEVPSYVDDSVATPPSGGAEISTWDNANQISFGSKPKQQGDNERKKGTPWTEEEHRLFLIGLSKFGKGDWRSISRNVVVTRTPTQVASHAQKYFLRQNSVKKERKRSSIHDITTVDSNSVPVPIDQNWVPPPGGSVQQSLQYPSSNMLDQMGTFGYSNYGFGM

SEQ ID NO: 1670 - protein, 148 aa, Triticum turgidum subsp. durum
MTVDRKDAEAAAAAAAPFEIPALQPGRKKRPRRSRDGPNSVSETIRRWKEVNQQLEHDPQGAKRARKPPAKGSKKGCMQGKGGPENTQCGFRGVRQRTWGKWVAEIREPNRVSRLWLGTFPTAEDAARAYDEAARAMYGALARTNFPV

SEQ ID NO: 1671 - protein, 226 aa, Capsella bursa-pastoris
RGKIEIKRIENTTNRQVTFCKRRNGLLKKAYELSVLCDAEVALIVFSSRGRLYEYSNNSVKGTIERYKKAISDNSNTGSVAEINAQYYQQESAKLRQQIISIQNSNRQLMGETIGSMSPKELRNLEGRLERSITRIRSKKNELLFSEIDYMQKREVDLHNDNQILRAKIAENERNNPSISLMPGGSNYEQIMPPPQTQPQQFDSRNYFQVAALQPNNHHYSSAGRQ

SEQ ID NO: 1672 - protein, 244 aa, Nicotiana tabacum
MRRGRATAAAKQAAEASPAAGSGGLKDIRFRGVRKRQWGRFAAEIRDPWKKLGWLGTFDSAEEAAKAYDAAARTLRGPKAKTNFPLPPYSHFNQTINPNGPFIDPRLYSQENHPIVIQRPTSSSMSSTVESFSGPRPPPRQQTAVLPSRKHPRSPPVVPDDCRSDCDSSLLLLKMAIVIMIMKMIISFHQLFGNHCLSISTFLHLWMLILMIFTAQHYVFDGIWFRNLDLLIIRKSPIWFPFFI

SEQ ID NO: 1673 - protein, 224 aa, Camelina sativa
RGKIEIKRIENTTNRQVTFCKRRNGLLKKAYELSVLCDAEVALIVFSSRGRLYEYSNNSVKGTIERYKKAISDNSNTGSVAEINAQYYQQESAKLRQQIISIQNSNRQLMGETLGSMSPKELRNLEGRLERSITRIRSKKNELLFSEIDYVQKRESDLHNDNQLLRAKIAENERNHPSISLMPGGSNYEQLMPPPQTQPFDSRNYFQVAALQPNNHHYSSAGRQ

SEQ ID NO: 1674 - protein, 125 aa, Wilkesia gymnoxiphium
TNRQVTYSKRRNGIFKKAHELTVLCDAKVSLIMFSNTGKFHEYISPSTTTKKIYDMYHTTLGFDLWSSHYERMTETMKKLKDSNNKLRREIRQRVLGEDLDDLDMNDLTILEQQMQDSLTVVRER

SEQ ID NO: 1675 - protein, 228 aa, Lepidium squamatum
RGKIEIKRIENTTNRQVTFCKRRNGLLKKAYELSVLCDAEVALVVFSSRGRLYEYSNNSVKGTIERYKKAISDNTNTGSVAEINAQYYQQESAKLRQQIVSIQNSNRQLMGETIGSMSPKELRNLEGRLERSITRIRSKKNELLFAEIDYMQKREVDLHNDNQLLRAKIAENERNNPSISLMPGGSNYEQIMPPPQTQPQPQQFDSRNYFQVAALQPNNHHYSSAGRQ

SEQ ID NO: 1676 - protein, 125 aa, Adenothamnus validus
TNRQVTYSKRRNGIFKKSHELTVLCDAKVSLIMFSNTGKFHEYISPSTTTKKIYDMYQTTLGFDLWSSHYERMTETMKKLKDSNNKLRREIRQRVLGEDLDGLDMNDLTILEQQMQDSLTVVRER

SEQ ID NO: 1677 - protein, 230 aa, Lepidium squamatum
RGKIEIKRIENTTNRQVTFCKRRNGLLKKAYELSVLCDAEVALVVFSSRGRLYEYSNNSVKGTIERYKKAISDNTNTGSVAEINAQYYQQESAKLRQQIVSIQNSNRQLMGETIGSMSPKELRNLEGRLERSITRIRSKKNELLFAEIDYMQKREVDLHNDNQLLRAKIAENERNNPSISLMPGGSNYEQIMPPPQTQPQPQSQSFDSRNYFQVAALQPNNHHYSSADRQ

SEQ ID NO: 1678 - protein, 194 aa, Hordeum vulgare subsp. vulgare
MMLSSAYSTPAADELGGPPPLPPPPGADVSVIVGALTGVLLGLFLFLIYAKHCRQRGRGGARGAAGGLGLGFRASSTCDRCRSGVSLSVVDALPVVRFGDMGGAAAAAQPECAVCLGTFDPAADELLRVLPKCRHAFHADCVDTWLEAHSTCPVCRRRVGKEDAFAVIPELEAADADWYPAREAEMQIVVRRPA

SEQ ID NO: 1679 - protein, 125 aa, Kyhosia bolanderi
TNRQVTYSKRRNGIFKKAHELTVLCDAKVSLIMFSNTGKFHEYVSPSTTTKKIYDMYQTTLGFDLWSSHYERMTETMKKVKESNNKLRREIRQRVLGEDLDGLDMNDLTILEQQMQDSLTVVRER

SEQ ID NO: 1680 - protein, 226 aa, Lepidium phlebopetalum
RGKIEIKRIENTTNRQVTFCKRRNGLLKKAYELSVLCDAEVALIVFSSRGRLYEYSNNSVKGTIERYKKTKSDNSNTGSVAEINAQYYQQESVKLRQHIVSIQNSNRQLMGETIGSMSAKELKNLEGRLERSIARIRSKKNELLFAEIDYMQKREVDLHNDNQLLRAKIAENERNNPSISLMPGGSNYEQIMPPPQTQTQPFDSRNYFQVAALQPNNHHYSSAGRQ

SEQ ID NO: 1681 - protein, 630 aa, Zea mays
MKREYQDAGGSGGDMGSSKDKMMAAAAGAGEQEEEDVDELLAALGYKVRSSDMADVAQKLEQLEMAMGMGGVGGAGATADDGFVSHLATDTVHYNPSDLSSWVESMLSELNAPPAPLPPATPAPRLASTSSTVTSGAAAGAGYFDLPPAVDSSSSTYALKPIPSPVAAPSADPSTDSAREPKRMRTGGGSTSSSSSSSSSMDGGRTRSSVVEAAPPATQASAAANGPAVPVVVVDTQEAGIRLVHALLACAEAVQQENFSAAEALVKQIPMLASSQGGAMRKVAAYFGEALARRVYRFRPPPDSSLLDAAFADLLHAHFYESCPYLKFAHFTANQAILEAFAGCRRVHVVDFGIKQGMQWPALLQALALRPGGPPSFRLTGVGPPQPDETDALQQVGWKLAQFAHTIRVDFQYRGLVAATLADLEPFMLQPEGDDTDDEPEVIAVNSVFELHRLLAQPGALEKVLGTVRAVRPRIVTVVEQEANHNSGTFLDRFTESLHYYSTMFDSLEGAGAGSGQSTDASPAAAGGTDQVMSEVYLGRQICNVVACEGAERTERHETLGQWRSRLGGSGFAPVHLGSNAYKQASTLLALFAGGDGYRVEEKDGCLTLGWHTRPLIATSAWRVAAAAAP

SEQ ID NO: 1682 - protein, 125 aa, Harmonia nutans
TNRQVTYSKRRNGIFKKAHELTVLCDAKVSLIMFSNTGKFHEYISPSTTTKKIYDMYQTTLGFDLWSSHYERMTETMKKLKDSNNKLRREIRQRVLGEDLDGLDMNDLTILEQQMQDSLTVVRER

SEQ ID NO: 1683 - protein, 125 aa, Osmadenia tenella
TNRQVTYSKRRNGIFKKAHELTVLCDAKVSLIMFSNTGKFHEYISPSTTTKKIYDMYQTTLGFDLWSSHYERMTETMKKLKDSNNKLRREIRQRVLGEDLDGLDINDLTILEQQMQDSLTVVRER

SEQ ID NO: 1684 - protein, 290 aa, Triticum aestivum
  misc_feature (46)..(46): Xaa can be any naturally occurring amino acid
RRGRTRDARTEAPAAGAGKGKETASCFAKMGEPTGPDSKKCKIEDXDREAQVEEEAATATASDGSAGGERGRKQAKGKGSKSKQPAADEPPRDYVHVRARRGQATDSHSLAERVRREKITLKMKMLQDLVPGCNKVIGKALMLDEIINYVQSLQQQVEFLSMKLSTVNPQLDFDTLSNLLHKDMNQALGPSASTVFPLESAGTVYPLCDQADLYQSFSSGAMENQCSMGLLDMALPPAPQYPFQKQQQDFWEASAQNGLHMDHEQSQENAGSAPNFDGQLQAADHPEIEF

SEQ ID NO: 1685 - protein, 1227 aa, Oryza sativa
  misc_feature (268)..(268): Xaa can be any naturally occurring amino acid
  misc_feature (300)..(300): Xaa can be any naturally occurring amino acid
  misc_feature (317)..(317): Xaa can be any naturally occurring amino acid
MAGNEWINGYLEAILDSGGAAGGGGGGGGGGGGGGGGGGGGGGGGVDPRSPAAGAASPRGPHMNFNPTHYFVEEVVKGVDESDLHRTWIKLELEGILRISARRKEQEQVRRETSEDLAEDLFEGEKADTVGELAQQDTPMKKKFQRNFSELTVSWSDENKEKKLYIVLIRSYTAYFTHWCHSVYATKLQNFTEFLYSLFYFSLHGLVRGDNMELGRDSDTGGQVKYVVELARALAMMPGVYRVDLFTRQVSSPEVDWSYGEPTEMLTXPVPLTEREAVRVLVRTLCAFRAVQGTSTSVKXPVALPPRVCRRSSRAYXLNMSKALGEQVSNGKLVLPYVIHGHYADAGDVAALLSGALNVPMVLTGHSLGRNKLEQIMKQGRMSKEEIDSTYKIMRRIEGEELALDAAELVITSTRQEIDEQWGLYDGFDVKLEKVLRARARRGVSCHGRFMPRMVVIPPGMDFSSVVVPEDTSDGDDGKDFEIASPRSLPPIWAEVMRFLTNPHKPMILALSRPDPKKNITTLVKAFGECRPLRELANLILIMGNRDDIDEMSAGNASVLTTVLKLIDKYDLYGSVAFPKHHKQSDVPEIYRLTGKMKGVFINPALVEPFGLTLIEAAAHGLPIVATKNGGPVDIKNALNNGLLVDPHDQHAIADALLKLVADKNLWQECRKNGLRNIQLYSWPEHCRTYLTRIAGCRIRNPRWLMDTPADAAAEEEEALEDSLMDVQDLSLRLSIDGERGSSMNDAPSSDPQDSVQRIMNKIKRSSPADTDGAKIPAEAAATATSGAMNKYPLLRRRRRLFVIAVDCYGDDGSASKRMLQVIQEVFRAVRSDSQMSRISGFALSTAMPLPETLKLLQLGKIPPTDFDALICGSGSEVYYPSTAQCVDAGGRLRPDQDYLLHINHRWSHDGAKQTIAKLAHDGSGTNVEPDVESCNPHCVSFFIKDPNKVRTIDEMRERVRMRGLRCHLMYCRNATRLQVVPLLASRSQALRYLFVRWGLSVGNMYLIVGEHGDTDHEEMLSGLHKTVIIRGVTEKGSEQLVRSSGSYQREDVVPSESPLIAFTKGDLKADEIMRALKEVTKAASGMDWQRPLCKTAYWFQSRVYTNMEEKEEMTMLSLGVGAASKHSISNRKFRLKEVTDHKFNLGDQDHNSGHVRKKLRLSEEQLTVLENMYEAGSNLDQALKQGLAEKLNIKPRQVEVWFQNRRARTKHKQIEEECKNRGGWRA

SEQ ID NO: 1686 - protein, 233 aa, Glycine max; identical to SEQ ID NO: 168

SEQ ID NO: 1687 - protein, 212 aa, Hordeum vulgare subsp. vulgare
MDKHQLFGSSNVDTTFFAANGTHDAARARKQRARRRRRRSARCGGGDGDGGEMDGGGDPKKRRLTDEQAEILELSFREDRKLETARKVYLAAELGLDPKQVAVWFQNRRARHKNKTLEEEFARLKHAHDAAILHKCHLENELLRLKERLGATDRRCGASGRQLGATGHLWMADTPLAPLACAAGARARPSRREPASSSRVSAGQTCWGGTMT

SEQ ID NO: 1688 - protein, 181 aa, Triticum aestivum
  misc_feature (161)..(161): Xaa can be any naturally occurring amino acid
QCPFFEELHAVFTERAKNMQRQLLQSESGTSVKKKLKRPSGDQSSGESDENEYGVEVSDDEKPVISKKRKAGDKGQPSQRMAENSRAGSSSIHDLLQEFLVQQQHVDMLWHETMERRAQERLIFEQEWRQSMQKLEQERLMLEQSWIEREEQRRMREEARXAQKRDSLMTTLLNKLLQEDL

SEQ ID NO: 1689 - protein, 251 aa, Zea mays
MEPSSQPQPMMGVGSQPYPAAAPYVPVPGSLAVPPGSQPAAAFPNPTQLSAQHQMVYQQAQQFHQQLQQQQEQQLREFWTTQMDEIKQANDFKIHTLPLARIKKIMKADEDVRMISAEAPVVFAKACEVFILELTLRSWMHTEENKRRTLQKNDIAAAITRTDIYDFLVDIIPRDEMKEEGLGHNPIVGLPPAMGAPADHGSHPYYYVPAQQVQGAGMMYGGQQGHPVTYMWQTPQGQAAEPPEEEQQQSA

SEQ ID NO: 1690 - protein, 228 aa, Eruca sativa
RGKIEIKRIENTTNRQVTFCKRRNGLLKKAYELSVLCDAEVALIVFSSRGRLYEYSNNSVKGTIERYKKAISDNSNTGSVAEINAQYYQQESAKLRQQIISIQNSNRQLMGETIGSMSPKELRNLEGRLDRSVNRIRSKKNELLFAEIDYMQKREVDLHNDNQLLRAKIAENERNNPGMISLMPGGSSNYEQIMPPPQTQPQTFDSRNYFQVAALQPNNHHYSSAGRE

SEQ ID NO: 1691 - protein, 545 aa, Zea mays
MNNERESQEPAAATTSDWLDESIAFLAANLDLGFNDYGWPSASEAQERHDDVRSMIVETLAPTATTLHQPSLNLDISVASSSSPMTSQQEFGQPKKRKSSGNSSSQRPHVGGGGQQEKGGASCARPKPGKKGSGKGAAATVDREARWAEQLLNPCAAAIEAGNLPRTQHLLYVLGELASFSGDPNHRLAAHGLRALTRRLPHATGQAALATVKVPPCECPTSVFSGVDPRLFRASLIRFNEVSPWFAVPNALANSAIAQAASRKKGAVAEPRQVHVVDIGVSHGVQWPTLLEALTRVPRGSTPPSVRLTLVGPTATPPVPFSASPPGYDCSPQLLRYAKSIDLDLAIVHAPCLDTLLGTLTPGETLVVCLQFRLGLTTADDQAAIFRKVRDLNPELMVLTELDGGRRNDDSATSEFAARLELLWRFLDSTAAAFKGMDAYERRVMEAEAGTALALTPRCGATVDGGREAWRARLAAAGFEEAAFGGEAVETAKALLRKYDGGWELVPPSPSAAAAVGLRWEGQPVSFSSMWRPAQASPVLIGPCT

SEQ ID NO: 1692 - protein, 1220 aa, Aspergillus nidulans FGSC A4
MSRSSAGFADFFPTAPSVIQQKRYQATRERQRSRPHLSREHADEEQIVTGSRTSGETVNGNSPQNLGQELRSDLNKSRKEVAEDGSASHGEANTPANNTSGPGTGSSNDTRLDTLTPLTNTESSPQNNPSPSQAKAPNGDEPDGFRQARANVSNSTMTPLHTPPTPTTHSLSQRVAIVKGSKLVHDPDRAPSKDKRKRPCYVDIVSDEQEGRLSDPRLSIQNYTRGAGCRQKTKYRPAPYVLRHWPYDPASTVGPGPPVQIVVTGFDPLTPLAPISTLFSSFGEIAEINNRTDPDTGRFLGICSVKYKDSASFHGSGPVSASLAAKNAFHECKKGQRIGNNRIKVEYDRDGQTSEKLASRAIAAQRIDSKIDMPVVGEPKSEAQVNKNEPPPTAPKGPSGRSFMRPSAVIPEGPRASFQKPAIPSLIEETPILNQIKRDPYIFIAHCYVPVLSSTLPHLKKRLKAFNWKDIRCDRTGYYIIFENSRRGEEETERCYKFCHMKLLFTYIMNMESQPYGNPHYERSPSPERMKQEQRQKAETERLKKEAELDIEEEKKQRALDLDPCTEVLAIVIKDLRDKLLEDVKSRIAAPALYDYLDPERHASRRKQLGIPDPEGIKRPMFRLDFDSRDSTPDPHAKFLNKRHPSGVSGLNILSALPRIRKAHRLDRTDVAFLDERRKQPLRRRNVRPLYHRLQQLHDAEDSDEEQHTPLSRDTDDQDSRPPSRIGSETESEDADEDAAEALDNSTERLDNEDRHSEIGDLEAAVQDYSPSRKRKRTSESPSHRKKQKESDDFSAVGEGTRTDDIPQVLDGVHKGTVSQGLSDSADESSRLDHNKVLLEELVEDIKTTHSEEPGIKTHHVQVRQSAENMVEGAEYGEAARHEVEWRVSNDEPRPIVDDDDSVVMDLDGWQDVVKDEEDLQFLRNILEKQPMSVIGNLSAWAWRQKEIKALNRPGDVGPTRQAASIEGYYVPNITGAARTEGRKRILESEKSKYLPHRIKVQKAREEREAKAKSDPQNAAAEAARIAAAKTISKSTSRSTRVNNRRLIADINAQKQALPSQGGDSDVLRFNQLKKRKKPVRFARSAIHNWGLYAEVNISANEMIIEYVGEKVRQQVADMRERRYLKSGIGSSYLFRIDENTVIDATKRGGIARFINHSCTPNCTAKIIKVDGSKRIVIYALRDIERDEELTYDYKFEREWDSDDRIPCLCGSAGCKGFLN

SEQ ID NO: 1693 - protein, 183 aa, Thalictrum thalictroides
AGIVKKAKELTVPCDTQVSLIMISSSGKIHEYISPSYTHKNLYDKYQQVSGNNIWKPHYERMQDNLQKLKEINNKLRKEIRQRNGEDLDELNFQQLCGLEQNMEKSVDCVRNRKFHVISSQTDIYKKKVKNHQVTYNGLLRGFEERDADCQYASPDFEGEYQSTIEFATENPHIFAFGLQPQL

SEQ ID NO: 1694 - protein, 231 aa, Eruca sativa
RGKIEIKRIENTTNRQVTFCKRRNGLLKKAYELSVLCDAEVALIVFSSRGRLYEYSNNSVKGTIERYKKAISDNSNTGSVAEINAQYYQQESAKLRQQIISIQNSNRQLMGETIGSMSPKELRNLEGRLDRSVNRIRSKKNELLFAEIDYMQKRSLQEVDLHNDNQLLRAKIAENERNNPGMINLMPGGSSNYEQIMPPPQTQPQTFDSRNYFQVAALQPNNHHYSSAGRE

SEQ ID NO: 1695 - protein, 125 aa, Carlquistia muirii
TNRQVTYSKRRNGIFKKAHELTVLCDAKVSLIMFSNTGKFHEYISPSTTTKKIYDMYQTTLGFDLWSSHYERMTEIMKKLKDSNNKLRREIRQRVLGEDLDGLDMNDLTILEQQMQDSLTVVRER

SEQ ID NO: 1696 - protein, 565 aa, Zea mays
MGRSRGVLSSGDDDTGHRSKRRRVSSGGDATDSISASIGGAGEGGGKKALYHCNYCNKDISGKIRIKCSKCPDFDLCVECFSVGAEVTPHRSNHPYKVMDNLSFPLICPDWNADEEILLLEGIEMYGLGNWLEVAEHVGTKSKLQCIDHYTSAYMNSPCYPLPDMSHVNGKNRKELLAMAKVQGESKKGTLLLPGELTPKVESQFSPSRVKVEDALGEGPAGRSPSHMAVGANKKASNVGHIKDGATVSKVEDVHVDRSVGVKKPRYSADEGPSLTELSGYNAKRHEFDPEYDNDAEQALAEMEFKETDSETDRELKLRVLRIYLSRLDERKRRKEFILERNLLFPNPLEKDLTSEDRELYHRYKVFMRFLSKEEHEALVRSVIEERKIRRRIQELQECRSAGCRTLAEAKIHIEQKRKKEYELNAQKAKDSSQLNANNKSVQKMNRPMKIESDGNLDPKKGGAGLDSPKTTGPTSVKQWDDWDIVGLPGAELLSASEKLLCCQNRLLPSHYLRMQEVLMQEIFKGSVLKKEDAHVLFKVDPTKVDSVYDMVSKKLGNHEEAPTV

SEQ ID NO: 1697 - protein, 226 aa, Guillenia flavescens
RGKIEIKRIENTTNRQVTFCKRRNGLLKKAYELSVLCDAEVALIVFSSRGRLYEYSNNSVKGTIERYKKAISDNSNTGSVAEINAQYYQQESAKLRQNIISIQNSNRQLMGETIGSMSAKELRNLEGRLDRSINRIRSKKNELLFAEIDYMQKREVDLHNDNQLLRAKIAENERNHPSMSLMPGGSNYEQIMPPPQTQSQPFDSRNYFQVAALQPNNHHYSSAGRQ

SEQ ID NO: 1698 - protein, 576 aa, Oryza sativa (japonica cultivar-group)
MEWGDTAGWLAEEDNAIEPSLSGGGGRVQGTRIALGQAASGAVCLGAGKDRVPEAYVVVVHGRRRGRRLRVRAMLKLNNGRTAVSPLRGSGAVGAEAYLEGIDSSRWATAVAAAASMGTVSRLSLKHLLRCFDFYSIDRKFCNGTNLNTLYQYHWSMRLSTGSWHSWYPVKHTEIKVVSIENSEVLADGSKGVVKVRGPQVMKGYYKDHFFQFTDAKMMGCSFQISPILIVNESFTVDNGLLTSTLKIRRDKFRSANETVDHLFVSCPLARFACNVIASAFGLEKINSIQHLLEAWLNEFDKKKKQLVAVGIAATLGRWKAKEVYNVGSTLRLAKAGCKRDYIIPSMAGTLIEDGWSLWAYILPFMPGALHVSRTCNLIGCVISILHPGKGNADEVDGIRSEDVACLICQELLFDPSVLNCGHVYCMPCLTSVGGEELECQFCGAPHPAEPTVCSNLKNFLKHRFEELYNSRQEKSSGVPSRKEGTRKGKPSEILHTHVGVGCDGCGVFPIQGRRYSCKECEAPGLDLCEKCFMTGSTAEGRFDQKHTADHDMELDDSFLFPNLVDYMDDLYIDMT

SEQ ID NO: 1699 - protein, 226 aa, Thlaspi arvense
RGKIEIKRIENTTNRQVTFCKRRNGLLKKAYELSVLCDAEVALIVFSSRGRLYEYSNNSVKGTIERYKKAISDNSNTGSVAEINAQYYQQESAKLRQQIISIQNSNRQLMGETIGSMSPKELRNLEGRLDRSITRIRSKKNELLFSEIDYMQKREVDLHNDNQLLRAKIAENERSNPSMNLMPGGSNYEQLMPPPQTQSQPFDSRNYFQVAALQPNNHHYSSAGRQ

SEQ ID NO: 1700 - protein, 506 aa, Triticum aestivum
  misc_feature (52)..(52): Xaa can be any naturally occurring amino acid
MERVDGAGLGARGSAGAMLGMEMHLVHQPQPQMHAASSFQQPPEHLHHANGXGGFQVQHHQAMPVRQQHPQPPYAAYVAPPSRVVKAHEEEEMGNGVGNGGGVLQQPGAGAAGCPWSRMKWTDAMVRLLIAVVYNAGDDGEGVSAGGKAAASHSHGKAVASAAAHGGHGPQRKGKWRSVSRAMVERGFKVSPQQCEDKFNDLNKRYKRVVELLGRGTACNVVANPALLDTMGELTAKAKEEARKLLSSKRLFFREMCHYHNPGGTATASHGTEGGADCFDNPRPATAPAGRQVVNSSTRSEDDSEDDVLSSKEVEEEEEDDDDYDLDDVEEKAPGTKRRDDRVDDSNGFHNYGGHKNKLRRGESSAAAAGEDKEENGNNKPARSTMQQLKRELAAVEAGGDQQQLRQWVQRRALELEKQELAYEVQDFALGKRRYKWEQFKATKDWDMEHERLRIECLRVDGRRMLLMLKQKELDLDDLPGAQTPPPGAAFQQQPGSSPSTTGHPN

SEQ ID NO: 1701 - protein, 125 aa, Anisocarpus scabridus
TNRQVTYSKRRNGIFKKAHELTVLCDAKVSLIMFSNTGKFHEYISPSTTTKKIYDMYQTTLGFDLWSSHYERMTETMKKLKESNNKLRREIRQRVLGEDLDGLDMNDLTILEQQMQDSLTVVRER

SEQ ID NO: 1702 - protein, 226 aa, Thlaspi arvense
RGKIEIKRIGNTTNRQVTFCKRRNGLLKKAYELSVLCDAEVALIVFSSRGRLYEYSNNSVKGTIERYKKAISDNSNTGSVAEINAQYYQQESAKLRQQIISIQNSNRQLMGETIGSMSPKELRNLEGRLDRSITRIRSKKNELLFSEIDYMQKREVDLHNDNQLLRAKIAENERSNPSMNLMPGGPNYEQLMPPPQTQSQPFDSRNYFQVAALQPNNHHYSSAGRQ

SEQ ID NO: 1703 - protein, 238 aa, Oryza sativa (japonica cultivar-group)
MGEEAPEEYELGGGEDERVMEWEAGLPGADELTPLSQPLVPAGLAAAFRIPPEPGRTLLDVHRASAATVSRLRRASSSSSSSFPAFASKGAGAGADEAESGGGANGGNGNTNNNSSKRARLVWTPQLHKRFVEVVAHLGMKNAVPKTIMQLMNVEGLTRENVASHLQKYRLYVKRMQGLSNEGPSPSDHIFASTPVPHASLHDQVPSPYHPHPHHHSYNNAAYAATVSSYHHYHHANH

SEQ ID NO: 1704 - protein, 116 aa, Triticum aestivum
MGCKACDKPRPSYRKGLWSPEEDQKLRDYILRHGHGCWSALPAKAGLQRNGKSCRLRWINYLRPGLKHGMFSPEEEETVMSLHAALGNKWSRIARHLPGRTDNEVKNYWNSYLKKR

SEQ ID NO: 1705 - protein, 242 aa, Saccharomyces cerevisiae
MTDRNFSPQQGQGPQESLPEGPQPSTMIQREEMNMPRQYSEQQQLQENEGEGENTRLPVSEEEFRMVQELQAIQAGHDQANLPPSGRGSLEGEDNGNSDGADGEMDEDDEEYDVFRNVGQGLVGHYKEIMIRYWQELINEIESTNEPGSEHQDDFKSHSLPFARIRKVMKTDEDVKMISAEAPIIFAKACEIFITELTMRAWCVAERNKRRTLQKADIAEALQKSDMFDFLIDVVPRRPLPQ

SEQ ID NO: 1706 - protein, 343 aa, Oryza sativa (japonica cultivar-group)
MKRGCEDELGAGDVILRGVEEVEEEDDDDLVLPGFRFHPTDEELVTFYLRRKIAEKRLSIEIIKEMDIYKHDPSDFLKTSTVGSEKEWYFFCLRGRKYRNSIRPNRVTGSGFWKATGIDRPICSAAGGGGGDCIGLKKSLVYYRGSAGKGTKTDWMMHEFRLPPPPADDLAAGRSSPPPSLQEAEVWTICRIFQRNITHKKQPQPQLAVAAAAVPAPVPDATSSITGSLESDSAGDDVVEYMNTLQPPPASNVNGGYSNQRYFQEQWNSSSNDNTTVFHQHAAAAPPPEPSPATAMAGFGHDQSVLSSPAPSDFYYKDGCNDDIYRMVMELADPSLFYDHIYA

SEQ ID NO: 1707 - protein, 207 aa, Arabidopsis thaliana
MASFEESSDLEAIQSHLLEDLLVCDGFMGDFDFDASFVSGLWCIEPHVPKQEPDSPVLDPDSFVNEFLQVEGESSSSSSPELNSSSSTYETDQSVKKAERFEEEVDARHYRGVRRRPWGKFAAEIRDPAKKGSRIWLGTFESDVDAARAYDCAAFKLRGRKAVLNFPLDAGKYEAPANSGRKRKRSDVHEELQRTQSNSSSSSCDAF

SEQ ID NO: 1708 - protein, 298 aa, Zea mays
MGAPKQRWTSEEEAALRAGIARHGVGKWRTILKDPEFSSTLCYRSNVDLKDKWRNMNVIVSTSSSRDKAKSALKRIRTIPKNNEHTMAITRVTSDIDDEIVDEKPIVSLPSEAKNTSSSKKSHRLDNIIMEAIKNLNEPTGSHRTTIANYIEEQYWPPSDFDHLLSAKLKDLSTSGKLIKVNRKYRIAPSSPNSERRSPKMPLLEDVQREPVKIWSDDTKTLTRSQVDAELARMATMTAEEASVAAARAVAEAEAIMAEAEAAAKEAEAAEAEAQAAQAFAEAAFLTLKNRNAGKLMA

SEQ ID NO: 1709 - protein, 215 aa, Brassica napus
  misc_feature (174)..(174): Xaa can be any naturally occurring amino acid
  misc_feature (194)..(194): Xaa can be any naturally occurring amino acid
  misc_feature (208)..(209): Xaa can be any naturally occurring amino acid
  misc_feature (214)..(214): Xaa can be any naturally occurring amino acid
MRKGRGSSAVPPALPGSVKEPRYRGVRKRPWGRFAAEIRDPLKKSRVWLGTFDSAEEAARAYDAAARNLRGPKAKTNFQIDCSPSSPLQPLHHRNQIDPFMDHRLYGGEQEVVIISRPASSSMSSTVKSCSGVRPASSSVAKAATKRYPRTPPVAPEDCRSDCDSSSSVVEDGXDIASSSSRRKPPFEFDLNFXPLDGVDLFVGADDXXCTDLXL

SEQ ID NO: 1710 - protein, 222 aa, Oryza sativa (japonica cultivar-group)
MAPRNAAEAVAVAVAEGGGAGMEPRFRGVRKRPWGRYAAEIRDPARKARVWLGTFDTAEAAARAYDSAALHFRGPKAKTNFPVAFAHAHHHAPPPPLPKAAALAVVSPTSSTVESSSRDTPAAAPVAAAAKAQVPASPSLDLSLGMSAMVAAQPFLFLDPRVAVTVAVAAPVPRRPAVVSVKKEVARLDEQSDTGSSSSVVDASPAVGVGLDLNLPPPIEEA

SEQ ID NO: 1711 - protein, 267 aa, Oryza sativa
MGRGKVQLKRIENSMNRQVTFSKRRNGLLKKAHEISVLCDAEVAAIVFSPKGKLYEYATDSRMDKILERYERYSYAEKALISAESESEGNWCHEYRKLKAKIETIQKCHKHLMGEDLESLNLKELQQLEQQLESSLKHIRSRKSHLMLESISELQKKERSLQEENKALQKELVERQKNVRGQQQVGQWDQTQVQAQAQAQPQAQTSFFFFFMLRDQQALLSPQNICYPPVMMGQRNDAAARRRWRPKARCNFRIGGFPPWMLSTFKA

SEQ ID NO: 1712 - protein, 225 aa, Eruca sativa
GRGKIEIKRIENTTNRQVTFCKRRNGLLKKAYELSVLCDAEVALVVFSSRGRLYEYSNNSVKGTIERYKKAISDNTNTGTVAEINAQYYQQESAKLRQQIISIQNSNRQLMGETIGSMSPKELRNLEGRLDRSINRIRSKKNELLFAEIDYMHKREVDLHSDNQLLRTKIAENERNNPSMNLTPGGYEQIMQPSQTQSQPFDSRNYFQVAALQPNNHHYSSAGRQ

SEQ ID NO: 1713 - protein, 248 aa, Helianthus annuus
MGRGKVQLRRIENKINRQVTFSKRRGGLLKKAHEISVLCDAEVALIVFSNKGKLFEFSTDSCMDSILERYERYSYTERQLVAADATPRSWTLEYNKLKSRAELLQRNHRHYMGEDIESLSLKEIQNLEQQLDTGLKNIRTRKNQLLHESISELQKKGKAIQEQNTTLTKKIKEKEKDKTIPQNTQWEMHNYVDHDTTFLMPPPPPALNMGGDYNHGGGGSSEGADGRTNELDLSLQPIYSCHMRCFPS

SEQ ID NO: 1714 - protein, 299 aa, Phaseolus vulgaris
MSNISMVEAKLPPGFRFHPRDEELVCDYLMKKLTHNDSLLMIDVDLNKCEPWDIPETACVGGKDWYFYTQRDRKYATGLRTNRATASGYWKATGKDRPILRKGTLVGMRKTLVFYQGRAPKGRKTEWVMHEFRIEGPHGPPKVSSSKEDWVLCRVFYKSREVSAKPSMGSCYEDTGSSSLPALMDSYISFDQTQAHADEFEQVPCFSIFSQNQANPIFNHMTTMEPKLPATTYGGAPNLGYCLDPLSCDRKVLKAVLSQITKMERNPLNQSLKGSTSFGEGSSESYLSEVGMPHMWNNY

SEQ ID NO: 1715 - protein, 229 aa, Guillenia flavescens
RGKIEIKRIDNTTNRQVTFRKRRNGLLKKAYELSVLCDAEVALIVFSSRGRLYEYSNNSVKGTIERYKKAISDNSNTGSVAEINAQYYQQESAKLRQQIVSIQNSNRQLMGETIGSMIPKDLKTLESKLDKSITRIRSKKNELLFAEIDYMQKRSLQEVDLHNDNQLLRAKIAENERNNPSMNLMPGGSNYEQIMPLPQTQSQPFDSRNYFQVAALQPNNHHYSSAGRH

SEQ ID NO: 1716 - protein, 256 aa, Phaseolus vulgaris
MDATTPSELPPGFRFHPTDEELIVYYLCNQATSKPCPASIIPEVDLYKFDPWELPDKTEFGENEWYFFSPRDRKYPNGVRPNRATVSGYWKATGTDKAIYSGSKLVGVKKSLVFYKGRPPKGDKTDWIMHEYRLAESKQPVNRKIGSMRLDDWVLCRIYKKKNTGKTLEHKETHPKVQMTNLIAANNDEQKMMNLPRTWSLTYLLDMNYLGPILSDGSYCSTFDFQISNANIGIDPFVNSQPVEMANNYVSDSGKY

SEQ ID NO: 1717 - protein, 322 aa, Glycine max
MGSQGGAVQEPKTTTPLARQGSLYNLTLDEVHNQLGNLGKPLGSMNLDELLKSVWSAEAGGGGEASGWDFGVGDATNMPHGKAAASGSSLNPQGSLTLSRDLSRKTVDEVWKDMQLKKVTNRDKKIQERQATLGEMTLEDFLVKAGVVAEALPTTRGRAMSGVDSNGASSQHGHWLQYQQLPSSVQQPNVMGGYVAGHAIQQPFQVGVNLVLDAAYSETPASLMGTLSDTQTPGRKRGASGVVVEKTVERRQKRMIKNRESAARSRARRQAYTQELEIKVSRLEEENERLRRLNEMERALPSVPPPEPKPKQQLRRTSSAIF

SEQ ID NO: 1718 - protein, 226 aa, Guillenia flavescens
RGKIEIKRIENTTNRQVTFCKRRNGLLKKAYELSVLCDAEVALIVFSSRGRLYEYSNNSVKGTIERYKKAISDNSNTGSVAEINAQYYQQESAKLRQQIVSIQNSNRQLMGETIGSMIPKDLKTLESKLDKSITRIRSKKNELLFAEIDYMQKREVDLHNDNQLLRAKIAENERNNPSMNLMPGGSNYEQIMPLPQTQSQPFDSRNYFQVAALQPNNHHYSSAGRH

SEQ ID NO: 1719 - protein, 220 aa, Oryza sativa
MALDGKPPVPPPSTPPMDSWACGGRRSKRRGGGGGSSGGSGSSGGGGGGESEEEYLAACLLMLAHGVRDEAEVVGVAAATAKPQHGYECSVCGKVYGSYQALGGHKTSHRKPPSPAAEPAAGEEPSSGGVAGEAKVHRCSICLRTFPSGQALGGHKRLHYEGGAVGDAVKEKNSLKTKAAVATAVLKDFDLNLPAAATTAGDEAESSPPEAKRARLLLLV

SEQ ID NO: 1720 - protein, 259 aa, Phaseolus vulgaris
EGCVEEPGHHAEKKRRLSVDQVKALEKNFEVENKLEPDRKVKLAQELGLQPRQVAVWFQNRRARWKTKQLERDYGVLKANYDSLKLNYDTLQQDNEALLKEIKELKSRLLLQEESNTESDVSVKEEMITLQDSNPLCETAIPGSESKELSYECFNKSDEVLGFKDGSSDSDSSAILNEENANNNDNSPNNATISSSGAMQSQSFLSSSSPMNCFQFQKQFPTQYVKMEEHNFLSADEACNFFSDEQAPTLQWYCSEEWS

SEQ ID NO: 1721 - protein, 327 aa, Phaseolus vulgaris
MAGGKLHPGSNMSLLLQNDRLPCSSEVLESLWAHTSNAASFQGSKSMVDFENVSGGRVTDRPFFQALEKEDNCDDDYEGCFHQPGKKRRLTSEQVQFLERNFEVENKLEPERKVQLAKELGLQPRQVAIWFQNRRARFKTKQLEKDYGTLKASYDRLKGDYESLLQENDKLKAEVNSLESKLILRDKEKENSDDKSSPDAVNSPHKEPMDLISNSTSENGTKVSLPIMVTCKQEDANSAKSDVLDSDSPHCTDGNHPSSFVEPADSSHAFEPDHSDFSQDEEDNLSESLLTLPCLPKVEEACYDDPPENPCNFGFHVEDQTFCFWPY

SEQ ID NO: 1722 - protein, 857 aa, Zea mays
MVAAAEGSGRRDAEAELNLPPGFRFHPTDEELVVYYLCRKVARQQVPVPIIAEVDLYKFDPWDLPEKALFGRKEWYFFTPRDRKYPNGSRPNRTAGKGYWKATGADKSIVPMGSTRAAGIKKALVFYSGKAPRGVKTDWIMHEYRVAQADHTLGKKGSQKLDEWVLCRLYNKRNNWDKVKVEEQELEAAPRRQHHLQSAEDSMSNSFQTHDSDIDNVFELQNCYGNNMVQGQAMTPRNDIGVVTVKEDNDWFTDMNLDDLQASYNMAHTTNHSTVTFQSFFLKLHPFCPHRTTGDAHVRAAGQCGPILHGLNLGSHEPSAPHSVTHQPPLRDEVSRVTQTAVLRLASGDLRPPSPAAVLCHGPWTVVRQQQGSSLCPTACPPPASATSASGLWAPVSRLCPRRSSSGLRHQALSYSSTAPVPATARSSTPPSRTALKVFDQSPAPWRAFLKAYSHGPFPLEALHLFKHARQHLADDTFVFTFVLKACAGLGWHRAGAQLHALVVQKGFEFHAYVHTALINVYVMSRCLVEARKVFDEMPVKNVVSWNVMITGFAGWGEVEYARLLFDQMPCRNVVSWTGLIDGYTRACLYAEALTLLRHMMAGGISPSEITVLAVIPAISNLGGILMGEMLNGYCEKKGIMSDARVGNSLIDLYAKIGSVQNSLKVFDEMLDRRNLVSWTSIISGFAMHGLSVEALELFAEMRRAGIKPNRITFLSVINACSHGGLVEQGLAFFKSMVYEYNIDPEIKHFGCIIDMLGRAGRLCEAEQIIEGLPMEVNVTVWRILLGCCSKYGEVAMGERAIKMISDLERESGGDFAVLSNVLTELGRFSDAEQARKLLDQRKIVKVPGLALVGEIQ

SEQ ID NO: 1723 - protein, 170 aa, Glycine max
  misc_feature (67)..(67): Xaa can be any naturally occurring amino acid
  misc_feature (82)..(82): Xaa can be any naturally occurring amino acid
  misc_feature (107)..(107): Xaa can be any naturally occurring amino acid
  misc_feature (121)..(121): Xaa can be any naturally occurring amino acid
PDYFKRVMISELALFKKVMHTRCGGAIEVMGLMQGKTDDHAIMVMDAFVLRVKSTETILNARADAYXYMVEYSHTNNQAGRXDNALGWHHFHAGYGGWLAEIDGSTXMLNHAIEEPMLLVXIDPTRTAMAWRVESEALQTHPERHEPCDEPVNEYPSIHIIEIEDIGGNC

SEQ ID NO: 1724 - protein, 183 aa, Arabidopsis thaliana
MPTLYKKAGCQFQLTTMSCNNNGLAFFPENFSLQNHHQEEEDHPQLLQDFHGFLGKRSPMNNVQGFCNLDMNGDEEYSDDGSKMGEKKRRLNMEQLKALEKDFELGNKLESDRKLELARALGLQPRQIAIWFQNRRARSKTKQLEKDYDMLKRQFESLRDENEVLQTQNQKLQAQVMALKSRE

SEQ ID NO: 1725 - protein, 234 aa, Arabidopsis thaliana
MVSPENANWICDLIDADYGSFTIQGPGFSWPVQQPIGVSSNSSAGVDGSAGNSEASKEPGSKKRGRCESSSATSSKACREKQRRDRLNDKFMELGAILEPGNPPKTDKAAILVDAVRMVTQLRGEAQKLKDSNSSLQDKIKELKTEKNELRDEKQRLKTEKEKLEQQLKAINAPQPSFFPAPPMMPTAFASAQGQAPGNKMVPIISYPGVAMWQFMPPASVDTSQDHVLRPPVA

SEQ ID NO: 1726 - protein, 251 aa, Zea mays
MNRRSESTPERGAMGGGERDGGENQRWPPWLKPLLGTSFFGQCKLHADAHKSECNMYCLDCMNGALCSQCLAYHRDHHAIQIRRSSYHDVIRVSEIQKVLDISGVQTYIINSARVVFLNERPQPRPGKGVTNTCEVCERSLLDTFRFCSLGCKIVRTSGDFRIRKKHAIVAKKKREKKHAPPQQQQHRGAADSADDDDSSTSTSGGSDKSSVVQSFTPSTPPATTANSFRAGKRRKGVPHRSPFGSLVVEF

SEQ ID NO: 1727 - protein, 175 aa, Glycine max
MTTAEKTSNLDLIRQHLFGENIISDSSSFVSNLHHHPVKLEPPSSPEFDFTSYILDNNTSSNFFTFLEGYDLPTMKKSEHYDEAKRYRGVRRRPWGKFAAEIRDPTRKGTRVWLGTFDSEIDAAKAYDCAAFKMRGQKAILNFPLEAGESDPKPNNSCGRKRRRDQNHDHEFELP

SEQ ID NO: 1728 - protein, 226 aa, Vitis labrusca x Vitis vinifera
MGRGKIEIKRIENTTNRQVTFCKRRNGLLKKAYELSVLCDAEVALIVFSSRGRLYEYANNSVKSTIERYKKASADSSNTGSVSEANAQFYQQESSKLHQQIRNLQNSNRHMLGESLGSLNFKDLKSLEIRLEKGISRIRSKKNELLFAEIEYMQKREIDLHNDNQYLRARIAENERNEQQMSLMPGGANYELMPSQQFDSRNYFQLNGLQPNQSYSRQDQPALQLV

SEQ ID NO: 1729 - protein, 224 aa, Phaseolus vulgaris
EQMPEKKHRLSSEQVHLLEKSFEEENKLEPERKTQLAKKLGLQPRQVAVWFQNRRARWKTKQLERDFDVLKSSYDTLLSSYDSLMKDNEKLKSEVVSLNEKLQDQAKEVPEEPFYDKKVDPLPVEDIATIFSTRVEDHQSSGSVGSAVVDEGSPQLVVDSVDSYLPADNPGGCVGPVERIQSEEEDGSDDGRSYMDVFVVSETENQNHEEGEALVWWTNMYYVE

SEQ ID NO: 1730 - protein, 218 aa, Eustoma grandiflorum
MGRGKIDIKRIENNTNRQVTFCKRRNGLLKKAYELSVLCDAEVALIIFSSRGRVYEYANNNIKSTIDRYRKATSDASTVFTTQEINAQFYQQESKKLRQQIQVLQNSNRHLMGEGLSSLNVKELKQLESRLERGISRTRSKKHEMILAEVEYLQKREIQLEQENACIRSKIAEQERLQELSMMPPGQDYNAMQAYLAQNFMQVNGLMEGPPVYSMLHK

SEQ ID NO: 1731 - protein, 93 aa, Antirrhinum majus
MASTRGSGRPWSAKENKAFERALAVYDKDTPDRWANVARAVEGRTPEEVKKHYEILVEDIKYIESGKVPFPNYRTTGGNMKTDEKRFRNLKIR

SEQ ID NO: 1732 - protein, 127 aa, Triticum aestivum
MMERAEDLGLSLSLSSSLTPRTHHVAMQLHAPERRFLEMPLLPAKRVCEVSADEERSSQRGGSDDEDGGCGMDGSRKKLRLSKDQSAVLEDSFREHPTLNPRQKAALAQQLGLRSRQVEVWFQNRRA

SEQ ID NO: 1733 - protein, 249 aa, Oryza sativa (japonica cultivar-group)
MRSPAALLPVVADGGGGVGVEEEMDVDEDMAMCGGRGGGGGEKKRRLSVEQVRALERSFETENKLEPERNARLARDLGLQPRQVAVWFQNRRARWKTKQLERDYAALRQSYDALRADHDGRFAATRTPSSPRRRRTRRRPTPDPPATGAPQGSSESDSSAVLNDAEILPHKPAPAAAADAAASEETEAVVTGAALLHHAEVFFHGQLLKVDDDEAAFLGDDGAACGGFFADEHLPSLPWWAEPTEQWTT

SEQ ID NO: 1734 - protein, 208 aa, Magnolia praecocissima
NRQVTFCKRRNGLLKKAYELSVLCDAEVALIVFSSRGRLYEYANNSVRNTIDRYKKACADSSSLGCVSEANSQYYQQESSKLRQQIALLQNANRHLMGEALSSMTVKELKQLENRLEKGISRIRSKKNELLFAEIEYMQKREVDLQNDNMYLRAKITENERAQQQMGMLPAPEYDVMPGFDSRNFLQVNLMDSSHHYSHQEQTALQLG

SEQ ID NO: 1735 - protein, 376 aa, Glycine max
RFQVPSNWLWDLHLEMKDRQRWRAEEDALLRAYVKQYGPREWNLVSQRMNTPLNRDAKSCLERWKNYLKPGIKKGSLTEEEQRLVINLQATHGNKWKKIAAQVPGRTAKRLGKWWEVFKEKQQRETKGNNCTIDPINDSKYEHILESFAEKLVKERPSTSTSTSFVMATSNSSFLHADAPAPAPALLPSWLSNSNGTAPVRPPSPSVTLSLSPSTVAAPPPWMQPPVRGQDNASPLVLGNVAPHGAVLAFGENMVMSELVECCKELDEVHHALAGHKKEAAWRLSRVELQLESEKAGRRREKMEEIEAKIKALREEQTAALDRIEAEYREQLAGLRRDAESKEQKLAEQWAAKHLRLTKFLEQVGCRSRLTEPNGR

SEQ ID NO: 1736 - protein, 542 aa, Arabidopsis thaliana
MSSSDRDIIDIESGEEDLYSDGGNDIIDIESGEEDLYSDGGNVSDDYNPVDDTISRSEKSYVVVKEEDILKLQRDDIEQVSTVLSVSQVESIVLLLHYHWCVSKLEDEWFTDEERIRKTVGILKEPVVDVNGTEVDIQCGICFESYTRKEIARVSCGHPYCKTCWTGYITTKIEDGPGCLRVKCPEPSCYAVVGQDMIDEVTEKKDKDKYYRYFLRSYVEDGKKMKWCPSPGCEYAVEFGVNGSSSYDVSCLCSYKFCWNCCEDAHSPVDCETVSKWLLKNKDESENMNWILAKTKPCPKCKRPIEKNTGCNHMSCSAPCRHYFCWACLQPLSDHKACNAFKADNEDETKRKRAKDAIDRYTHFYERWAFNQSSRLKAMSDLEKWQSVELKQLSDIQSTPETQLSFTVDAWLQIIECRRVLKWTYAYGYYILSQERNKRVFASSFSLSCCSAEAENGLERLHHCAEEELKQFIGKIEDPSKNFGELRAKLIDLTKATKTYFENLVKALENGLVDVAYNESQSIEEPESFTKRSKTRKIKTLI

SEQ ID NO: 1737 - protein, 231 aa, Magnolia praecocissima
ENKINRQVTFSKRRNGLLKKAYELSVLCDAEVALIVFSSRGKLYEFGSAGINKTLERYQRCCYTFHDANITDRDTQGWYQEVSKLNAKCDSLQRSQRHLLGEDLGPLSVKELQKLERQLESALTQTRQRKTQIMLEHMEALREKERQLGDINKELKNKLEAKGQGAFRAMQASWESGPLVGNNGFPMHPSQSAAIECEPTLQIGYHSFAAPEANIPRTVVAESNFMHGWIL

SEQ ID NO: 1738 - protein, 97 aa, Triticum aestivum
  misc_feature (41)..(41): Xaa can be any naturally occurring amino acid
MASLSMSAGWTPKQNKLFEQALAVHDRDTPDRWHNIARAVXGGGKSADDVRRYYELLVHDIARIEAGKVSFPAYRPPCPGPGHNASYEADRLKHLKI

SEQ ID NO: 1739 - protein, 248 aa, Oryza sativa (japonica cultivar-group)
MSSSSLTTTSSMDSVVDGGLDTRLSLAVGCCPPRRRPVLLFGEVLPSPEKKVAAAAVVAAGKRGREQRGEAEAEATTTRQRRSCKKGRRGRGDDDDDDGDRRSPSGGGGDEEGASRKKLRLTGEQATLLEDSFRAHNILSHAEKQELAGKLGLSARQVEVWFQNRRARTKLKQTEADCDLLRRWCDHLAADNARLRRDLAELRRSSSSPPVSGLAVATPVVCPSCAHDDKRRLAFATAAAAAGDMASN

SEQ ID NO: 1740 - protein, 321 aa, Triticum aestivum
  misc_feature (114)..(114): Xaa can be any naturally occurring amino acid
  misc_feature (195)..(195): Xaa can be any naturally occurring amino acid
  misc_feature (203)..(203): Xaa can be any naturally occurring amino acid
  misc_feature (225)..(225): Xaa can be any naturally occurring amino acid
  misc_feature (245)..(245): Xaa can be any naturally occurring amino acid
  misc_feature (279)..(279): Xaa can be any naturally occurring amino acid
SDDTKAPFGVVGGATGNLRLNWGGGRARFPHITCVGVHSEYGAQSVALSGGYIYDEDHGEWFLYTGCGGRHLSGHKRTNRELSSDQIFEGVGGALFLTRKNAYPLRVVGSHKEXLSSYAPETGVRYDGLYKIEKCWKNIGVQDTYNVCMYLFVRCDNEPSPWTRDLHGDRTGPLPNIRDLQCATDITERARSPSXHYVEYEGXKCVNSPPISKKRAQSGDSECDXQFKMSHKRAHIPIKERLLKXFGCPMCQNVMKDPLPPPVVKSLKTCFTSAFGNRXSIRKKAGAAPLCGPKYVKNCPPRPINFGISWEPPRYLSYFSL

SEQ ID NO: 1741 - protein, 204 aa, Magnolia praecocissima
  misc_feature (34)..(35): Xaa can be any naturally occurring amino acid
  misc_feature (85)..(86): Xaa can be any naturally occurring amino acid
MARGKIQMKRIENSVHRQVTFCKRRAGLLKKARXXSVLCDVDIGLMIFSTHGKLYELATKGTMEGLIERYLGTSRGAQIEGGPAXXPPESDQEVFMLKQEIELLQKGLRNSIGGGMGNMTMDELHALERHLELWIYHIRSTKMRIMIQEIQSLKDNEGILKSANEFLQGKIEEQNVIFDMPPMIGGIPYPLTIPNEIFLEELNY

SEQ ID NO: 1742 - protein, 173 aa, Magnolia praecocissima
  misc_feature (171)..(171): Xaa can be any naturally occurring amino acid
KKAYELSVLCDAEVALIVFSPRGKLYEFGNAGMQKTIDRYLKHSKDTNINKAAVEQNVQLWKYEAAHMSKKIEILEDSKRKLLGESLESCSIEELQHIENQLERSLKNIRGRKSQLYVEQIKQLKEKERILSEENTVLIEKCGLRPQEPSTIQREIVPYDQGTQDQEVELXCT

SEQ ID NO: 1743 - protein, 232 aa, Lilium longiflorum
MGRGKIEIKRIENTTNRQVTFCKRRNGLLKKAYELSVLCDAEVALIVFSSRGRVYEYSNNSIKQTIDRYKKACDSSNSNSLIQVNSQQYFQQESAKLRHQIQILTNANRHLVGEALSSLTVKELKQLENRLERGLTRIRSKKHELLFAEIEFSQKREVELQSDNMYLRAKIAENERTQAAIVQARAEFDALPTFDSRNFYQVNNMLEAPPHYHHQDQTALHLGYEAKDDSVP

SEQ ID NO: 1744 - protein, 602 aa, Oryza sativa (japonica cultivar-group)
MDTLFRLVSLQAASEQQQQQQQSASYNSRSTTSSGSRSSSHQTNASYSYYHHSSNSGGGGGGGGGYYYGGQQPPPSQYYYLEPYQEECGNAPHHQLYMDEDFSSSSSSRHFHHGARVQQQQPPASSTPTGTAPTPPLSTSSTAAGAGHGLFEAADLSFPPDLNLDFSSPASSSGGGTASSGAVGGGGGGRWASQLLLECARSVAARDSQRVQQLMWMLNELASPYGDVEQKLASYFLQGLFARLTASGPRTLRTLAAASDRNTSFDSTRRTALRFQELSPWSSFGHVAANGAILESFLEVAAAASSETQRFHILDLSNTFCTQWPTLLEALATRSADETPHLSITTVVSAAPSAPTAAVQRVMREIGQRMEKFARLMGVPFRFRAVHHSGDLAELDLDALDLREGGATTALAVNCVNSLRGVVPGRARRRDAFAASLRRLDPRVVTVVEEEADLVASDPDASSATEEGGDTEAAFLKVFGEGLRFFSAYMDSLEESFPKTSNERLALERGAGRAIVDLVSCPASESMERRETAASWARRMRSAGFSPVAFSEDVADDVRSLLRRYREGWSMREAGTDDSAAGAGVFLAWKEQPLVWASAWRP

SEQ ID NO: 1745 - protein, 278 aa, Arabidopsis thaliana
MPTLYKKAGCMTKSGERPKQRQRKGLWSPEEDQKLKSFILSRGHACWTTVPILAGLQRNGKSCRLRWINYLRPGLKRGSFSEEEEETILTLHSSLGNKWSRIAKYLPGRTDNEIKNYWHSYLKKRWLKSQPQLKSQISDLTESPSSLLSCGKRNLETETLDHVISFQKFSENPTSSPSKESNNNMIMNNSNNLPKLFFSEWISSSNPHIDYSSAFTDSKHINETQDQINEEEVMMINNNNYSSLEDVMLRTDFLQPDHEYANYYSSGDFFINSDQNYV

SEQ ID NO: 1746 - protein, 162 aa, Triticum aestivum
  misc_feature (58)..(58): Xaa can be any naturally occurring amino acid
  misc_feature (77)..(77): Xaa can be any naturally occurring amino acid
  misc_feature (84)..(84): Xaa can be any naturally occurring amino acid
  misc_feature (97)..(97): Xaa can be any naturally occurring amino acid
  misc_feature (100)..(100): Xaa can be any naturally occurring amino acid
  misc_feature (108)..(108): Xaa can be any naturally occurring amino acid
  misc_feature (115)..(115): Xaa can be any naturally occurring amino acid
  misc_feature (123)..(123): Xaa can be any naturally occurring amino acid
  misc_feature (127)..(127): Xaa can be any naturally occurring amino acid
  misc_feature (140)..(140): Xaa can be any naturally occurring amino acid
  misc_feature (142)..(142): Xaa can be any naturally occurring amino acid
SFPLGAETLAAAADDREQAQMGGKCPHRKVKKRRLNCKQVRRGKFLVKADDAVYDELXVKLADQGKDPEGKAFPSTXDLPRHGXFYCLHCDLVLPDXTVXRRFTTAPXRQQEKVXHFSGQPPXTQIXAISPGGMGIPDNXLXQVSLTCDSWLSFNALQPVQA

SEQ ID NO: 1747 - protein, 242 aa, Vitis vinifera
MGRGRVELKRIENKINRQVTFAKRRNGLLKKAYELSVLCDAEVALIIFSNRGKLYEFCSSSSMLKTLERYQKCNYGAPETNVSTREALELSSQQEYLKLKARYEALQLSQRNLLGEDLGPLSTKELESLERQLDVSLKQIRSTRTQYMLDQLTDLQRKEHMLNEANKTLKQRLLEGTQVNQLQWNPNAQDVGYGRQQAQPQGDGFFHPLECEPTLQIGYQPDPITVAAAGPSVNNYMPGWLP

SEQ ID NO: 1748 - protein, 225 aa, Oryza sativa (japonica cultivar-group)
MHCCMSLHPHRRHGDGDVDGSASGSGSARLTAGLINFLESRRAGAMSTTNSSSSVSVPAMDAHGQEEEEEPMQVQQQQAFRGVRKRPWGKFAAEIRDSTRNGVRVWLGTFDSAEEAALAYDQAAFAMRGSAAVLNFPMEQVRRSMDMSLLQEGASPVVALKRRHSMRAAAAGRRRKSAAPAPADQEGGGGVMELEDLGPDYLEELLAASQPIDITCCTSPSHHSI

SEQ ID NO: 1749 - protein, 263 aa, Zea mays
MLVIIAEVFVNIYFFSIDFARASIFYCNTMNSHGAGSHSRLLDLNYPPAEGAGEGASRFSSIPVSHREGSSSMPVQHIQASSSTPPATGEPRIGMRSCPIDVEAIDDDAVIYSSRPLPRARQQLTTTESITIIIDDDSETNLETAGDALDEHVNLLLSLGIERSHEPTSATNTFPGISMVDTPKVNTFKWIQVPPEPVKEVPKEPKLSCPICMNEITEAASTVCGHIFCQPCIKAAIKAQKKCPTCRRKLTPRQQHRVYLPSP

SEQ ID NO: 1750 - protein, 320 aa, Medicago truncatula
MGSHGGAIQEQKTGTLAREGSLYNLTFDEVQNQLGNLGKPLGSMNLDELLKSLWTSEATQGSGLDSGTTDGYMQHGQLASGSSMNPLTLSGDLSKKTIDEVWRDMQQKKSASPDRRTATLGEMTLEDFLMKAGVATESFPSEDNAMSGRVDSQQQQQNTSQHGHWMQYQVPSVQQPQQQHQHQNHQNNMMTGFAGYMAGHVVQQPVLDAGYTEAMVSLSPSSLMATSSDTQTQGRKRVASGVVVEKTVERRQKRMIKNRESAARSRARKQAYTQELEIKVSHLEEENERLKRLHEIERVLPSMPPPDPKHQLRRTSSAPL

SEQ ID NO: 1751 - protein, 228 aa, Sorghum bicolor
KVQLKRIENKINRQVTFSKRRNGLLKKAHEISVLCDAEVAVIVFSPKGKLYEYATDSRMDKILERYERYSYAEKALISAESESEGNWCHEYRKLKAKIETIQKCHKHLMGEDLESLNPKELQQLEQQLESSLKHIRSRKSHLMAESISELQKKERSLQEENKALQKELAERQKAAASRQQQQGAVGPADTDPGPDKLIIVLLHDEAGSAGSAASTKHMLPAADNRRER

SEQ ID NO: 1752 - protein, 267 aa, Oryza sativa (indica cultivar-group)
MQGEAAAGGGEEVDDEKERLIASLPLFTMASALAALPKSSPDCAVCLSPFAPEAELRLLPACRHAFHASCVDAWLRTTPSCPLCRATVSLPHPPLPTAAAAAASNAAQQDPLDSRSSNNSRSFRVEIGSISNRRSSAAADDRRTYSLGSFDYRVDEEVEAVVSRIARPAAAKSTTGSVTPAPGEALAEAAGSRGWLREYVDRLASSASSLSGRWSGRWSARWSQSHHSNRQEDSWRWDPEAAVMSAPRGVDDDEPGFVTLYRWIVGV

SEQ ID NO: 1753 - protein, 206 aa, Brassica napus
MTRRCSHCNQNGHNSRTCPNRGVKLFGVRLTEGSIRKSASMGNLSHHSGSGLSGLVSNNPGSPGNGPDNDGYASEDFVPGSSSSHRERKKGNPWREEEHRMFLLGLQKLGKGDWRGISRNYVKTRTPTQVASHAQKYFIRQSNVSRRKRRSSLFDIVPDEIMDSQEMEAEDIPMQGSDSVPAPLTLETEECESMKSTNSSGDEPPT

SEQ ID NO: 1754 - protein, 362 aa, Spinacia oleracea
MDYSTSWLSHSSPSLDISNANTLRLFDDAPVRDTNIFKQDPSPPRPPSTNLWHKDESGALVEELKRVNAENKRLTEMLTVVCENYNELKRQLVDHMSKQSSSNNEITKKRKLDNNNNNNNNNNNNNNNNGLVVRTNNNNNGESSSSDEEDSYGKPKEETIKAKITRVAVRTQASDSTLILKDGYQWRKYGQKVTRDNPCPRAYFKCSFAPGCPVKKKVQRSLEDQSMLVATYEGEHNHQPPAQQEGQGGAPSGSSRSLPLGSVPCTLDLTKSKSNANNVVNETTTTTTSSNNNNNNNNNNNNNKVLNNTTSSNHNQLPKFSSPEFQKLLAEQMASSLTKDPNFTAALAAAITGRFVQQTSSD

SEQ ID NO: 1755 - protein, 124 aa, Schizosaccharomyces pombe 972h-
MGRVARKRKHHSNGNHALFRTRVYGRDLDQIHNDLTESEKFDKLPIDPDLPGLGQHYCIECARYFDSSQALLVHKKGKVHKRRLKNLREEPYTQEEAEAAVNIGQPKQSVASKLADNSNVVMAD

SEQ ID NO: 1756 - protein, 272 aa, Medicago truncatula
MAFPPPHSFMFNPHEDHDQLPSTSLNTFPSFPPQHFQQGAPFLLKKSMSFSGIENKCHDHHEVHGDDELSDDGFQSGEKKKIRLNLDQVQALEKSFEFGNKLDPERKVQLAKALGLQPRQIAIWFQNRRARCKTKQLENEYEVLKKKFEAVKDENDALKVHNQKLQGELEALKSKDWCEGGTKYLMKETEGSWSNGSDNSLNINLDLSRTQALNSSVSSQNGRNLISLLPTSLNPNNIPQLLQFTSRPDIQDENFSSMFHNIDEHQNLWPWA

SEQ ID NO: 1757 - protein, 174 aa, Triticum aestivum
HYRTSLYKKAGWYRSGIPGISSTHASERILLGKSDVAGWGAFIKNPVHKNDYLGEYTGELISHKEADKRGKIYDRANSSFLFDLNDQFVLDAYRKGDKLKFANHSSSPNCYAKVMMVAGDHRVGIYAREHIEASAELFYDYRYGPDQAPAWARRPEGAKKDEASGSHRRAHKVA

SEQ ID NO: 1758 - protein, 157 aa, Zea mays
MVRGKTQMKRIENPASRQVTFSKRRNGLLKKAFELSVLCDAEVALVVFSPRGKLYEFASGSAQKTIERYRTYTKDNVSNKTAHQDIEQVKADAEGLAKKLEALEAYKRKLLGERLEECSFEELHSLEVKLEKSLHCIRGRKCKKQPPPPPPMLMAPP

SEQ ID NO: 1759 - protein, 188 aa, Brassica napus
MCNLTPFSDDNECSSTTSDNSSKRIRLGPWCDSSESTRPVVMLGVDSQETGVRLVKRVGSLAASQAGAMGKVATYFAEALARRIYRIRPSSPAVDPSFEEILQMHFYESCPYLKFAHFTANQAILEAVATARGVHVIDLGINQGMQWPALMQALALRPGGSPSFRLTGVGSPSEGDGIQQLGWKLAQL

SEQ ID NO: 1760 - protein, 214 aa, Magnolia praecocissima
MGRGKIEIKRIENSTNRQVTYSKRRGGIMKKAKELTVLCDAQVSLIMFSSTGKFSEYCSPSTTTKNIFDRYQQASGISLWNSHYERMQSHLIKLKEENNNLRREIRQRIGEDLEDLEIEELRGLEQNLESSIKVVRDRKYHVITTQTETYKKKLRSLRDEHAKLIRQLEGQAENGAYGLVDNGGPDYESALVLANGGVHSLHDTGFGIHDLRLA

SEQ ID NO: 1761 - protein, 283 aa, Zea mays
MIRGGNHQQAADVEEELARNSRHAAAVATSRQWSAQTESRIVRVSRVFGGKDRHSKVKTVKGLRDRRVRLSVPTAIQLYDLQDRLGLNQPSKVVDWLLNAARHEIDKLPPLQFPPQDLMVGHLTPHNMPLMVHDEKFGHLAAAAALASGGGGGAKVSQQGNVVDVDGTGAHHLVGRFPGGYHRFMELNSALGMVSGAMAPPYNNNYTGEAWNNSGGGVHDSGSPQIVAAAAHHSPFPSLLSLAPRPHQLAFYSSEADQQFQVENLGSQSLSLSSARAYHDQAS

SEQ ID NO: 1762 - protein, 268 aa, Zea mays
MGRGRIEIKRIENNTSRQVTFCKRRNGLLKKAYELSVLCDAEVALIVFSSRGRLYEYANNSVKATVERYKKAHTVGSSSGPPLLEHNAQQFYQQESAKLRNQIQMLQNTNRHLVGDSVGNLSLKELKQLESRLEKGISKIRARKSELLAAEISYMAKRETELQNDHMTLRTKIEEGEQQLQQVTVARSVAAAAAATNLELNPFLEMDTKCFFTGGPFATLDMKCFLPGSLQQMLEAQQRQMLATELNLGYQLAPPGSDAANNNPHHQF

SEQ ID NO: 1763 - protein, 488 aa, Arabidopsis thaliana
MGRSRGNFQNFEDPTQRTRKKKNAANVENFESTSLVPGAEGGGKYNCDYCQKDITGKIRIKCAVCPDFDLCIECMSVGAEITPHKCDHPYRVMGNLTFPLICPDWSADDEMLLLEGLEIYGLGNWAEVAEHVGTKSKEQCLEHYRNIYLNSPFFPLPDMSHVAGKNRKELQAMAKGRIDDKKAEQNMKEEYPFSPPKVKVEDTQKESFVDRSLGGKKPVSTSVNNSLVELSNYNQKREEFDPEYDNDAEQLLAEMEFKENDTPEEHELKLRVLRIYSKRLDERKRRKEFIIERNLLYPNPFEKDLSQEEKVQCRRLDVFMRFHSKEEHDELLRNVVSEYRMVKRLKDLKEAQVAGCRSTAEAERYLGRKRKRENEEGMNRGKESGQFGQIAGEMGSRPPVQASSSYVNDLDLIGFTESQLLSESEKRLCSEVKLVPPVYLQMQQVMSHEIFKGNVTKKSDAYSLFKIDPTKVDRVYDMLVKKGKEEVR

SEQ ID NO: 1764 - protein, 297 aa, Zea mays
LPLIPHPPLLPSLDWPDLFPADREALPHHHHHHHHHHTMLNMMTDLSCGPSSKVKEQVAAAPTGSGDRQGQGRGKIEIKRIENTTNRQVTFCKRRNGLLKKAYELSVLCDAEVALVVFSSRGRLYEYANNSVKSTIERYKKANSDSSNSGTVAEVNAQYYQQESSKLRQMIHSLQNANTRNIVGDSIHTMGLRDLKQMEGKLEKAIIKIRARKNELLYAEVDYMQKREMDLQTDNMYLRSKIAESNETGQPAMHMTMGAPPTSEYDHMAPFDSRNFLQVSMPQHYSHQLQPTTLQLG

SEQ ID NO: 1765 - protein, 189 aa, Magnolia praecocissima
ELTVLCDAEVALIVFSSRGRLYEYSNNSIKATIERYKKACADSSNTTSITQANSQYYQQEASKLRQQIQILQNANRHLMGDALSSLTVKELKQLENRLERGITRIRSKKHELLFAEIEYMQKREVELQNDNLYLRAKIAENERAQQANVLPAPEFDTLPSFDSRNYFEANMLEAASHYSHQDQTALHLG

SEQ ID NO: 1766 - protein, 223 aa, Vitis vinifera
MGRGKIEIKRIENTTNRQVTFCKRRNGLLKKAYELSVLCDAEVALIVFSSRGRVYEYSNNNIKSTIDRYKKASSDSTNGGFTMEINAQYYQQESAKLRQQIQMLQNSNRHLMGDSLASLTVKELKQLENRLERGITRIRSKKHELLLAEIEYLQKREIELENESVYLRTKIAEVERLQQANMVSTHEFNAIQALVSRNFFQPNMIEGGSTGYPLHDKKVLHLG

SEQ ID NO: 1767 - protein, 366 aa, Oryza sativa (indica cultivar-group)
MDSDYVAGILMSAAAAGLDLGVLDGGGGAFLETLCGGPGFAERAARLCGGGAGLFGLPAVGNAERGGCSREGSSVSDPAWAHATGGGGDNARKRKAPASAAAGKDKDAVVGGGSSPCEVGEAKAPDSKKCKAEVNPKVEEAASDGSVGDRVQKQGKGKNSSKPAAEPPKDYVHVRARRGQATDSHSLAERVRREKISQRMKVLQDLVPGCNKVVGKALMLDEIINYVQSLQQQVEFLSMKLATVNPQLDFGNLSTLLQKDMFQSCGPSVNSVFPLESAGTAFPFCDQADFFQSFGLGAMENQCSLDLANTALPHTGSTQYAFQKQQRDLWEDNTFQYNDEQSQEDAVSAPNFDGQLQAADHTEIEF

SEQ ID NO: 1768 - protein, 206 aa, Zea mays
  misc_feature (59)..(59): Xaa can be any naturally occurring amino acid
  misc_feature (63)..(63): Xaa can be any naturally occurring amino acid
  misc_feature (73)..(73): Xaa can be any naturally occurring amino acid
  misc_feature (75)..(75): Xaa can be any naturally occurring amino acid
  misc_feature (92)..(92): Xaa can be any naturally occurring amino acid
TAPEGGDPVEDFLISGAVDDEDLAIFCDGGRRLGIEGVNGDACGFEQSNLGKRGRDETXSSGXNSKACREKMXEXDKLNDRFLELSPVMNPXKQAKLDKANILSDAARMVAQRRGEAEKLKESNEKLRENIKDLKEEKDRLEQQVKAMSVAPTGYVPHLPHPASYHPAAFAPFVAPQQAAGNKSAPIPAPFPGMAMWQWLPPTIVD

SEQ ID NO: 1769 - protein, 337 aa, Glycine max
  misc_feature (118)..(118): Xaa can be any naturally occurring amino acid
MWEGTRGGGASKVSVSVFRGGEMGRSRVALRSADDDPNHRSKRKKAALNVENSETLPTGQGVTTSKVSLYHCNYCNKDISGKIRIKCAVCQDFDLCLECFSVGAEVTPHKSNHPYRIXDWNADEELLLLEGIETYGFGNWNEVAEYVGTKTKSQCIDHYNAVYMNSPCFPLPDLSHVMGKNKVELCAMAKGHEAKKEFSLTAELTLKEEALFTDRINYEESKNAEINNQTMSRLTSACGKAYPSTIKKASNVIQNNGGVKVEESRADWSIGEKKPKLSGEDRPSMTDLSGYSFKREEFDVEYDNDAEQVLADMEFKDTDTKAEYAMKLHVLHIYSKR

SEQ ID NO: 1770 - protein, 381 aa, Zea mays
MASTAIPSPPPPAVPERRVPLVPRLADDGGGGVMGDARGSSAGGSGSGSVAGISPSILIIAVIVVVMLLASLCIHYFIRHLCRHAGPAVSSSPSSRQAPPLPLVAHPAAVASVAAADGQGAGGGKAAEAEAERLIARLPLFTLSSSLASVPKSSRDCAVCQSAFRDDDELRLLPACRHAFHSRCVDPWLRGNPSCPLCRASIALPCPPLTDLLRVELGSVSSRRSNPDAAAAAVRAYPLPGGLPNSESSEYLVEEELQVVLKRSPRAAAGSSDPPSQQQQNQLAAVERGQPSSSSSVGLTPTASFRSTAERWSSRWSNRWSSRWSSGRWSSRYDAGTVTAAATAEWWWDMDGGVAPPTRRRDADDGSASFYGFVRWLTGAY

SEQ ID NO: 1771 - protein, 565 aa, Zea mays
MGRSRGVQNSGDDDTVHRSKRRRVASGGDATDSVSAGIGGAGEGGGKKALYHCNYCNKDISGKIRIKCSKCPDFDLCVECFSVGAEVTPHRSNHPYKVMDNLSFPLICPDWNADEEILLLEGIEMYGLGNWLEVAEHVGTKSKLQCIDHYTTAYMNSPCYPLPDMSHVNGKNRKELLAMAKVQGESKKGTSLLPGELTPKAESPFSPSRVKVEDALGEGLAGRSPSHIAVGANKKASNVGHIKDGSNVSKVEDGHVDRSVGVKKPRYSADEGPSLTELSGYNAKRHEFDPEYDNDAEQALAEMEFKETDSETDRELKLRVLRIYLSRLDERKRRKEFILERNLLFPNPLEKDLTNEDREVYHRYKVFMRFLSKEEHEALVRSVIEERKIRRRIQELQECRSAGCRTLAEAKIHIEQKRKKEYELNAQKAKESNHLIANTKLVQKMNRPMKIESDGNLDPKKGGVALDSPKTTGLTSVKQWDDWDIVGLPGAKLLSASEKLLCCQNRLLPSHYLRMQEVLMQEIFKGSVLKKEDAHVLFKVDPTKVDSVYDMVTKKLGNHVELPTV

SEQ ID NO: 1772 - protein, 449 aa, Zea mays
MVAASSTVVEVAVAAAAAAASALPQEQQAQPRPRPMHAGGANGRHHAYSRKDKSLGLLCSNFVVLYNREDVESVGLDEAAKRLGVERRRIYDIVNVLESVGKILSRKAKNRYTWIGFGGIPMALLELKERALRDKSGLASQQTEQQSAATISDDEDDDTLGKEVANIENEKLSQTVNNPSDKPGAPRCRLRSDHRKEKSLGLLTQNFVKLFLTMEQVDTISLDEAAKLLLGEGHEETNMRTKVRRLYDIANVLSSLNLIEKIQQGDSRKPAFRWLGRATTPDTENGVTVVVPPPGKTKSNKRAFGTELTNIDMHRSNLDSKVQKKAKLAKSGGDVLINCKLDSGGDVLINCKLDVRNRLGQGKQSGIVYGPFHPAGARKHELAGGNNPGQREMAEDWKSLFAPFRPQYKNQALSDLFAHYVDAWKTWYSEFAQGSNIMQQHFGHFDATK

SEQ ID NO: 1773 - protein, 249 aa, Rosa rugosa
MEFPKQITPADDPESSSQKKLGRGKIEIKRIENTTNRQVTFCKRRNGLLKKAYELSVLCDAEVALIVFSTRGRLYEYANNSVRATIERYKKACDSSNTGSVTETNVQFYQQEASKLRRQIREIQNSNRHILGEALSTLNVKELKNLEGRLEKGISRIRSKKNEMLFAEIEYMQKREIELQNHNNFLRAKIAENDRAQQQQANMMPGTLSAYDQSMPPPQSYDRSFLPVILESNHHYNRQGQNQTPLQLV

SEQ ID NO: 1774 - protein, 347 aa, Medicago truncatula
MSSKSLGRKLKGIKNGIGSIWSKHMFCRSNSHVALDVTPIEPIQQGQWASLPPELLLDIIRRVEKSETFWPARAVVIFCASVCKSWRSATLEIVKTPQQCGRITFPISVKQEEQKNVYIPVVLRLGAMSNFWCTKFSIYDSQPPDNAAVQSNCRPSGILNSKQVSPRRAPACSHLVGTVSYEVVITTDTPRKINCIMNSIPTSALYEGGNTPTPTSLPPIFDIPFSCSPALKEKSPMKGSYHGSLSELPELSQSSIEPLTLINISRSYFDQLIQCRGRCSARVISIKNFQLGASVHLPHNVSRAELKRVILQFAKIEKDLFIMDYSYPLSAFQAFAICLTSMRAMHL

SEQ ID NO: 1775 - protein, 251 aa, Aspergillus oryzae
MEQSTQSASQQQGRQQPVYDTRNGGHYAELYTGTWANVNQGLQGTARDILTTYWQHIINHLESDNHDYKIHQLPLARIKKVMKADPEVKMISAEAPILFAKGCDIFITELTMRAWIHAEDNKRRTLQRSDIAAALSKSDMFDFLIDIVPREEATSHAKRSSQAAGAPSGAPGPTGAAGQLPPSQHGVQHPSHHMAPPDYSLGQHGLQDQEYRQPAMYAGPVQSDPTAAYGQPQSQMFEGMYAAYPHLPPQQ

SEQ ID NO: 1776 - protein, 204 aa, Capsicum annuum
MKVGNSKCNGVNNNKDVHYRGVRKRPWGRYAAEIRDPGKKSRVWLGTFDTAEEAAKAYDAAAREFRGCKAKTNFPLPSENQNGSDSGSPDESFSGENRAHAPSEFELTRCLGAGGEGVGNGGRLAEVGLVRNGDTIVHAPTELDLTRLLGAGGEGGDNSGYSAEVGLVRNGFPIFHHQPPIEAPMMSNRSSPAESYSGETIINT

SEQ ID NO: 1777 - protein, 223 aa, Oryza sativa
MGRGKIEIKRIKNATNRQVTYSKRRTGIMKKARELTVLCDAQVAIIMFSSTGKYHEFCSPSTDIKGIFDRYQQAIGTSLWIEQYENMQRTLSHLKDINRNLRTEIRQRMGEDLDGLEFDELRGLEQNVDAALKEVRHRKYHVISTQTETYKKKVKHSYEAYKTLQQELGLCEEPAWFVDNTGGGWDGGAGAGAAADMFAFRVVPSQPNLHGMAYGGNHDLRLG

SEQ ID NO: 1778 - protein, 231 aa, Sorghum bicolor
MGRGRVELKRIENKINRQVTFAKRRNGLLKKAYELSVLCDAEVALIIFSNRGKLYEFCSGQSITKTLERYEKHMRPDTAVQNKENELVQSSRNEYLKLKARVDNLQRTQRNLLGEDLGSLGIKELEQLEKQLDSSLRHIRSTRTQHMLDQLTDLQRREQMLCEANKCLRRKLEETSNQVHSKCGARCQLTRLRAATPPHSRPHHILAMDCSFIPWKLQQSQPCRSGSLLNI

SEQ ID NO: 1779 - protein, 573 aa, Hordeum vulgare
MSPARLPISRESCLTIPAGFSPSALLDSPVLLTNFKVEPSPTTGSLGMAAILHKSAHPDMLPSPRDKSVRNAHEDRGSRDFEFKPHLNSSSQSLAPAMSDLKKHEHSMQNQSMNPSSSSSNMVNENRPPCSRESSLTVNVSAQNQPVGMVGLTDSMPAEVGTSEPQQMNSSDNAMQEPQSENVADKSADDGYNWRKYGQKHVKGSENPRSYYKCTHPNCEVKKLLERAVDGLITEVVYKGRHNHPKPQPNRRLAGGAVPSNQGEERYDGASAADDKSSNALSNLANPVHSPGMVEPVPASVSDDDIDAGGGRPYPGDDATEEEDLESKRRKMESAGIDAALMGKPNREPRVVVQTVSEVDILDDGYRWRKYGQKVVKGNPNPRSYYKCTSTGCPVRKHVERASHDPKSVITTYEGKHNHEVPAARNATHEMSAPPMKNVVHQINSNMPSSIGGMMRACEARNYTNQYSQAAETDTVSLDLGVGISPNHSDATNQMQSSGPDQMQYQMQTMGSMYGNMRHPSSMAAPAVQGNSAARMYGSREEKGNEGFTFRATPMDHSANLCYSSAGNLVMGP

SEQ ID NO: 1780 - protein, 220 aa, Rumex acetosa
MARGKIQIKRIENDTNRQVTYSKRRSGLFKKAKELTILCDAKVSIIMISNTNKLHEFISPNITTKQVYDAYQTTFSPDLWTSHYAKMEQELRNLNEVNRQIRKEIRRRMGCCLEDMSYQELVFLQQDMENAVTNLSERKYKVLSNQIETGKKKLRNVQGIRQNLMQAYDALREDPHCGLVYNGGEYDHVMRSHLVGLHFPREAHIPSAGGSCLTTYTYLE

SEQ ID NO: 1781 - protein, 195 aa, Rumex acetosa
MTRGQIQIRRIENITNRQVTYSKRRNGLFKKAQELVVLCDAKVSIIMISSRNKLHEFTTPGTTTKQIYDMYQQLSGNDVWSSQYAMMLEELRKIKEANGNIRKEIRRRMGFSMEDMSFRELVILQQDMQDSVAKISERKYKAIANQIETTRKKLRNSHGIHRSLVHAFGALNLNEYGADPPTAAGSYLTTYTYLE

SEQ ID NO: 1782 - protein, 295 aa, Brassica napus
MMKRLSSSDSMCGLVSNSPDEQSPRGYGSNFQSMLDGYEEDGTIVEEYSGNHHHMGLSEKKRRLRVDQVKALEKNFELENKLEPERKTKLAQELGLQPRQVAVWFQNRRARWKTKQLEKDYGLLKSQYDSLRHNFDSLRRDNDSLLQEISKMKGKINGEDEDNNNVKATTESDISAVKEEEDPIPSSPPQFLEHSTGFNYRRSFTDLRDLMPNPVVEAGSSDSCDSSAVLNEETSSENGRLTPPPPATVAGGSFLQFVKTEDHDEFFSGEEACGGFFSDEQPPSLNWYSASDHWT

SEQ ID NO: 1783 - protein, 253 aa, Rumex acetosa
MEFSNELSRDMEDGSPQRKMGRGKIEIKRIENVTNRQVTFCKRRNGLLKKAYELSVLCDAEVALIVFSSRGRLYEYANHSVKATIERYKKTCSDSTGVTSVEEANAQQEAAKLRNQIRTLQNQTRNTSRNLMGEGLTSMNMKDLKNLETRLEKGISRVRAKKNELLFGEIEFMQKKEIELHNNNQFLRAKIAESERSQQSMNLMPGSSSGEQHYELMPQSQAGPFDSRNFFQVSDLQPDERYSCQNQTPLQLV

SEQ ID NO: 1784 - protein, 216 aa, Brassica rapa subsp. chinensis
MNTFPASTEMVGSENESPVTTVAGGDYYPMLAASCPKKPAGRKKFQETRHPIYRGVRLRKSGKWVCEVREPNKKSRIWLGTFKTAEMAARAHDVAALALRGRGACLNYADSAWRLRIPETTCHKDIQKAAAEAALAFEAEKSDVTMQNGQNMEETIVEAIFTEENNDVFYMDEESMLEMPALLASMAEGMLLPPPSVHFGHNYDFDGDADVSLWSY

SEQ ID NO: 1785 - protein, 231 aa, Magnolia praecocissima
ENKINRQVTFAKRRNGLLKKAYELSVLCDAEVALIIFSNRGKLYEFCSSSSMLKTLERYQKCNYGAPELPVSTRETQSYHQEYLKLKARVEALQRSQRNLLGEDLGPLSGKELETLERQLDISLRQIRSTRTQCMLDQLGDLQRREHMLSEANKTLTRRLEEGAQANQNQVWEPNAHAVDSYNRQQPQQQGDGFFHPLECEPTLHIGYQPDQITIAAPGPSVNNYMPGWLV

SEQ ID NO: 1786 - protein, 284 aa, Arabidopsis thaliana
YEEKIQMGLDDSCNTGLVLGLGLSPTPNNYNHAIKKSSSTVDHRFIRLDPSLTLSLSGESYKIKTGAGAGDQICRQTSSHSGISSFSSGRVKREREISGGDGEEEAEETTERVVCSRVSDDHDDEEGVSARKKLRLTKQQSALLEDNFKLHSTLNPKQKQALARQLNLRPRQVEVWFQNRRARTKLKQTEVDCEFLKKCCETLTDENRRLQKELQDLKALKLSQPFYMHMPAATLTMCPSCERLGGGGVGGDTTAVDEETAKGAFSIVTKPRFYNPFTNPSAAC

SEQ ID NO: 1787 - protein, 231 aa, Arabidopsis lyrata
  misc_feature (163)..(163): Xaa can be any naturally occurring amino acid
MARGKIQIKRIENQTNRQVTYSMRRNGLFKKAHELTVLCDARVSIIMFSSSNKLHEYISPNTTTKEIVDLYQTVSDVDVWATQYERMQETKRKLLETNRNLRTQIKQRLGECLDELDIQELRRLEDEMENTFKLVRERKIKSLGNQIETTKKKNKSQQDIQKXLIHELELRAEDPHYGLVDNGGDYDSVLGYQIEGSRAYAFRFHQNHHHQYPNHALHAPSASDIITFHLL

SEQ ID NO: 1788 - protein, 240 aa, Magnolia praecocissima
MGRGRVQLKRIENKINRQVTFSKRRMGLLKKAHEISVLCDAEVAVIVFSTKGKLYEYSTDSRMSRILERYERYSYAERELVLSGPESEGSWCLEYGKLKAKVESLQRNLRHFTGEDLDTLSLKELQQLEHQLDAALKHIRSRRPIMLIHCGASKKEKSLREQNNMLEKEIQEKEKAMAQQAQWEQQNQSQSSHPSWLASPLPTLNIGTYHQGNEVEEEGARPPARTNSLMPPWMLRHVNE

SEQ ID NO: 1789 - protein, 166 aa, Brassica rapa subsp. pekinensis
HFTANQAILEAFEGKKRVHVIDFSMNQGLQWPALMQALALREGGPPVFRLTGIGPPAADNSDHLHEVGCKLAQLAEAIHVEFEYRGFVANSLADLDASMLELRPSEIEAVAVNSVFELHKLLGRTGGIEKVLGVVKQIKPVIFTVVEQESSHNGPVFLDRFTESLH

SEQ ID NO: 1790 - protein, 550 aa, Oryza sativa (indica cultivar-group)
MSAAAEEAAAAAAAEEVEGVEAGKKGVADAKGKGKEKVVVAEEDSAAAAGSGGSGGGRRTLVAYPARVAGYKDVVADAAVFRRALEGLHAQMGTKLKVPIIGGKDLDLHQLFKEVTSRGGIDKKYYMSLLYHFERLYLFEAQGWYQETADSRSISCIEMKAEGQASRKRKRGSNSCSSDPPINLEWTLCSTPLMKVPRYNILAPTIHFGSEKGQAGMKSTWSAQKLTIKIREIKGKNSQLELSNPGCRGNHEAIKPLDHLSACYLLYPTSLLSFLYGQRQELVPLTLSDLAASLDNDVQVIIDGKFEHGYIVTVIMGSKSTKAVLYNCTEEPAVPTAVPHVAIDSAEGIRPRRRRRRKKLSTTDPNHPKPNRSGYNFFFQDQHRKLKPEYPGQDRLISKMIGERWNNLGPEDKAVYQEKGVEDKARYQRQLALYREQRTGQPISNAVPIQQRLPQKEVTIDEVDSKVSEGDILLSNQGYSSSTSSSDETADSGEKNVEDDEEFNTETSPEPSMETTDSHGQPDPSADGERFELRRRENPKIDEKRDMPPN

SEQ ID NO: 1791 - protein, 192 aa, Zea mays
NLIEKIQQGDSRKPAFRWLGRATMPDTENGVTVVVPPPGKTTSNKRAFGTELTNIDMHRSNLDSKVQKKAKLAKSGGDVLINCKLDVRNRLGQGKQSGIVYGPFHPAGARKHELAGGNNPGQKERAEDWKSLSAPFRPQYKNQALSDLFAHYVDAWKTWYSEFAQGSNIMQQHFGHFGNHFLANYRVKHCSS

SEQ ID NO: 1792 - protein, 533 aa, Arabidopsis thaliana
  misc_feature (443)..(443): Xaa can be any naturally occurring amino acid
MSSSDRDIIDIESGEEDLYSDGGNDIIDIESGEEDLYSDGGNVSDDYNPVDDTISRSEKSYVVVKEEDILKLQRDDIEQVSTVLSVSQVESIVLLLHYHWCVSKLEDEWFTDEERIRKTVGILKEPVVDVNGTEVDIQCGICFESYTRKEIARVSCGHPYCKTCWTGYITTKIEDGPGCLRVKCPEPSCYAVVGQDMIDEVTEKKDKDKYYRYFLRSYVEDGKKMKWCPSPGCEYAVEFGVNGSSSYDVSCLCSYKFCWNCCEDAHSPVDCETVSKWLLKNKDESENMNWILAKTKPCPKCKRPIEKNTGCNHMSCSAPCRHYFCWACLQPLSDHKACNAFKADNEDETKRKRAKDAIDRYTHFYERWAFNQSSRLKAMSDLEKWQSVELKQLSDIQSTPETQLSFTVDAWLQIIECRRVLKWTYAYGYYILSQERNKRVFAXEAENGLERLHHCAEEELKQFIGKIEDPSKNFGELRAKLIDLTKATKTYFENLVKALENGLVDVAYNESQSIEEPESFTKRSKTRKIKTLI

SEQ ID NO: 1793 - protein, 373 aa, Aspergillus oryzae
MADEDFSLSPATSAPAPSPSAHFYPFATSPDIIRSHEKDLFLTSNLVQQAQNIIRSLRGARFAHTYSETIKNLTEILYFSLTTLIGNRTLGEEYCDLVQLEDDTLQLPSFIRRAGYIVSSIIVPWILQRILPAFRQRLRAKLERSIARQQLKAQQAREGTKPSRKETSKAPSFFTKLRIQKYILEHLDSITSLSPIYAVSIATFYFTGAYYHLSKRFWGLRYVFTKKLEENEQRVGYEVLGVLLVLQIAVQSVLHVKKVGLSLQQEDLETEATHSRGPDDTLIHSIENPPTLPLLPASDARYDLSEDSTAIPWIPSGQQSRCTLCLEPFKDPSVTTCGHVFCWTCVRDWVREKPECPLCRQDVLLSKILPLRG

SEQ ID NO: 1794 - protein, 301 aa, Zea mays
MVAMAAVQQQRRDAEAELNLPPGFRFHPTDEELVAHYLCARAAGRRPPVSIIAEVDLYRFDPWDLPERALFGRREWYFFTPRDRKYPNGSRPNRAAGSGYWKATGADKPVEHGGRTAGIKKALVFYHGKPPRGVKTEWIMHEYRLAEAGGARAKKSGAGTLRLDDWVLCRLYNKKNEWEKMQQQKEKEKEKKAMESEASLSHSHSDTRTPESEIDDDTFPELGSLPAFDDMGPAPAAAATAGVVLPKEEVEDFGDLGGDDWLAGINLDDLQMPGDAADFYGSMLVSPMAAKMEPDGGFPFF

SEQ ID NO: 1795 - protein, 240 aa, Populus tomentosa
MGRGKIEIKKIENPTNRQVTYSKRRNGIFKKAQELTVLCDAKVSLIMFSNTNKLNEYISPSTSTKKIYDQYQNTLGIDLWGTQYEKMQEHLRKLNDINHKLRKEIRQTRGEGLNDLSIDHLRGLEQHMTEALNGVRGRKLHVIKTQNETYRKKVKNLEERHGNLLMEYEAKLEDLQGGLVDNEAAVALSDGASDNEAAVALSDGASNLYAIRLHHGHNHHHHHPNLHLEDGFGAHELRLP

SEQ ID NO: 1796 - protein, 164 aa, Triticum aestivum
MTPVTISCSKFQQAAYDAVPPHETAVDGDDPISKKKMRQMRNRDSAMKSRERKKSYVKDLETRSKYLEAECRRLSYALQCCAAENMALRQNMLKDRPIGAHTAMQESAVLSETLPLVSLLRLGRPGVRNRHTMLTGRVGRRYPGNSGPVPACFFVQTCSIVSPK

SEQ ID NO: 1797 - protein, 308 aa, Glycine max
MECVEAALKSNYRKEMTLKLSPQTFTEEVSVQNGTTCDDFFVNDLLDFSHVEEEPEQQEDTPCVSLQHENPSHEPCTFKDDYASVPTSELSVLADDLADLEWLSHFVEDSFSEFSAAFPTVTENPTACLKEAEPEPEIPVFSFKTPVQTKARSKRTRNGLRVWPFGSPSFTDSSSSSTTSSSSSSSPSSPLLIYTQSLDHLCSEPNTKKMKKKPSSDTLAPRRCSHCGVQKTPQWRTGPLGPKTLCNACGVRFKSGRLLPEYRPACSPTFSSELHSNHHRKVLEMRQKKETVSVDETGFAPAHVVPSF

SEQ ID NO: 1798 - protein, 240 aa, Asparagus officinalis
MDQPDLSQVGPVGLTQLSPLQIQQIQAQIQLNHQHQLMVSRTLQARNYHNTLGVKPQPMKLQASVAAPQSKPTKLYRGVRQRHWGKWVAEIRLPKNRTRLWLGTFDTAEEAALAYDKAAYKLRGDYARLNFPNLKHTHLAGNPLHSSVDAKLEAICQTLESPGKKKVSTGSKPEPVVSSPTVETEEESSSSSSVTGATNSPVSEIESLDFNEVPWDETEDFVLRKYPSYEIDWDSILSSA

SEQ ID NO: 1799 - protein, 330 aa, Broussonetia papyrifera
MKALEPFMKSAHNNINNNISPISSSSSSSYLSSEPNFYPESETCSPSTTQMFSSGLFSSFNHMGSEQTGSLGLNQLTQSQILQIQAQIYFQQQQQQQQNLLMTTITPPQNSLNYLGPRAVPMKNVGANSKPNKLYRGVRQRHWGKWVAEIRLPKNRTRLWLGTFDTAEEAALAYDKAAYKLRGDFARLNFPHLRHEGAHVSGEFGEYKPLHSSVDAKLQAICQSLANSQKQGSAKEACSEPEVKPVIEPKMASDNSPKGELEVSSSSLSSSSSLSLSLSLSSPLSDESSAGSSSPESDVTLLDFSDSHWDGNENFGLGKYPSVEIDWDAL

SEQ ID NO: 1800 - protein, 198 aa, Brassica napus
MDNSNVVVRGNRQVNEEKPPPRVCPRCSSDNTKFCFYNNYRVTQPRYNCRNCRRFWTHGGALRDVPIGGRARKIKHIDQPSVSQVVPDEIEQVNHHQPFSHVQETTQFLGTFGGSSSSVAAVGNHFSYSTETHSVMVPPFRSIPPMARFDGSFHQGYYGDGFNDWVGNPLMNQSFGGNVGNYNSYFVNQEDPNKRNQS

SEQ ID NO: 1801 - protein, 275 aa, Arabidopsis thaliana
  misc_feature (145)..(145): Xaa can be any naturally occurring amino acid
  misc_feature (155)..(155): Xaa can be any naturally occurring amino acid
MGFDDTCNTGLVLGLGPSPIPNNYNSTIRQSSVYKLEPSLTLCLSGDPSVTVVTGADQLCRQTSSHSGVSSFSSGRVVKRERDGGEESPEEEEMTERVISDYHEDEEGISARKKLRLTKQQSALLEESFKDHSTLNPKQKQSSGXQLNLRPRQVXKWLGDSRASRTKLKQTEVDCEFLKKCCETLADENIRLQKEIQELKTLKLTQPFYMHMPASTLTKCPSCERIGGGGGGNGGGGGGSGATAVIVDGSTAKGAFSISSKPHFFNPFTNPSAAC

SEQ ID NO: 1802 - protein, 225 aa, Arabidopsis thaliana
MRRGRGSSAVAGPTVVAAINGSVKEIRFRGVRKRPWGRFAAEIRDPWKKARVWLGTFDSAEEAARAYDSAARNLRGPKAKTNFPIDSSSPPPPNLRFNQIRNQNQNQVDPFMDHRLFTDHQQQFPIVNRPTSSSMSSTVESFSGPRPTTMKPATTKRYPRTPPVVPEDCHSDCDSSSSVIDDDDDIASSSRRRNPPFQFDLNFPPLDCVDLFNGADDLHCTDLRL

SEQ ID NO: 1803 - protein, 359 aa, Zea mays
MAPLSPTPDDPSAPVSSSPRSLVPDASAEPMRRASPPQELPVARGEIQAALAPANASSAGAHGGGGSFTALLGLPTSQAMELLLPRTTPPALATAPAPTFPSDPHLVDRAARLSTFAPPSPSPSSTSPAPPLPAAANAGKRKADPVDRAPKGKAAKKGKTAEEKLAGGDGDDEKPAYVHVRARRGQATDSHSLAERARREKINARMELLKELVPGCSKVSGTALVLDEIINHVQSLQRQVEYLSMRLAAVNPRVDFGGLDSFLTTECGRIAGFNCKNGIDLEQVTWPEMGVHGARQLMQLQQQFWHGDLAHPHQVASQWEKRGDGHPPVFSNSSPSLFGYDLTSSGAQQTPASKLKTEL

SEQ ID NO: 1804 - protein, 252 aa, Brassica napus
MGSLRGDMEEPIHQSLPRGNSLYSLKLHEVQTHWGSSSKPLGSMNLDELLKSVLSAEANHPPEEGTEDGITRQGSLTLPRGLSRKTVNDVWRDIQHDENGCSSNPNKQPTLGEITLEDLLMKAGVVTESMTVPQNVVNVASNGQWAQYPQQQHQGFMPYPVSDMQEMVPPTALMMGGLSETQQVHGRKRVASSEGEFVERIVERKQKRMIKNRESASRSRARKQAYTQELEIKVSSLEEENQKLRRLMEVEK

SEQ ID NO: 1805 - protein, 645 aa, Arabidopsis thaliana
MARDIQLPCDGDGVCMRCKSNPPPEESLTCGTCVTPWHVSCLSSPPKTLASTLQWHCPDCSGEIDPLPVSGGATGFESAGSDLVAAIRAIEADESLSTEEKAKMRQRLLSGKGVEEDDEEEKRKKKGKGKNPNLDVLSALGDNLMCSFCMQLPERPVTKPCGHNACLKCFEKWMGQGKRTCGKCRSIIPEKMAKNPRINSSLVAAIRLAKVSKSAAATTSKVFHFISNQDRPDKAFTTERAKKTGKANAASGKIYVTIPPDHFGPIPAENDPVRNQGLLVGESWEDRLECRQWGAHFPHVAGIAGQSTYGAQSVALSGGYKDDEDHGEWFLYTGSGGRDLSGNKRTNKEQSFDQKFEKSNAALKLSCKLGYPVRVVRSHKEKRSAYAPEEGVRYDGVYRIEKCWRKVGVQGSFKVCRYLFVRCDNEPAPWTSDENGDRPRPIPNIPELNMATDLFERKETPSWDFDEGEGCWKWMKPPPASKKSVNVLAPEERKNLRKAIKAAHSNTMRARLLKEFKCQICQQVLTLPVTTPCAHNFCKACLEAKFAGKTLVRERSTGGRTLRSRKNVLNCPCCPTDISDFLQNPQVNREVAEVIEKLKTQEEDTAELEDEDEGECSGTTPEEDSEQPKKRIKLDTDATVSATIR

SEQ ID NO: 1806 - protein, 177 aa, Glycine max
EKDDGLGLGLSLKLGWGENDDDNNNNLNHHQQQQYPFYVHKPPQSVPNQRASFNNLFHFHDRSSETRSFLRGIDVNLPPPPPSAVVDDENAVSSPNSTISSISGKRSEREGNGDENERTSSSRGGGSDDDDGGACGGDGDGEASRKKLRLSKEQALVLEETFKEHNSLNPKQKQALA

SEQ ID NO: 1807 - protein, 428 aa, Arabidopsis thaliana
MENFVDENGFASLNQNIFTRDQEHMKEEDFPFEVVDQSKPTSFLQDFHHLDHDHQFDHHHHHGSSSSHPLLSVQTTSSCINNAPFEHCSYQENMVDFYETKPNLMNHHHFQAVENSYFTRNHPHHHQEINLVDEHDDPMDLEQNNMMMMRMIPFDYPPTETFKPMNFVMPDEISCVSADNDCYRATSFNKTKPFLTRKLSSSSSSSSWKETKKSTLVKGQWTAEEDRVLIQLVEKYGLRKWSHIAQVLPGRIGKQCRERWHNHLRPDIKKETWSEEEDRVLIEFHKEIGNKWAEIAKRLPGRTENSIKNHWNATKRRQFSKRKCRSKYPRPSLLQDYIKSLNMGALMASSVPARGRRRESNNKKKDVVVAVEEKKKEEEVYGQDRIVPECVFTDDFGFNEKLLEEGCSIDSLLDDIPQPDIDAFVHGL

SEQ ID NO: 1808 - protein, 281 aa, Oryza sativa
  misc_feature (24)..(24): Xaa can be any naturally occurring amino acid
MEVGGRKRGKPDGANGAGGKRARXTSGCPFGEGCHFLHHFPGGYQAVAKMTNLGGPAIAPPPGRMPMGNAVPDGPPTPTVKTRPGCNKYNTAEGCKWGDKCHFAHGERELGKPMLMDSSMPPPMGPRPTGHFAPPPMPSPAMSTPASFGASATAKISVDASLAGGIIGRGGVNTKQISRVTGAKLAIRDHESDTNLKNIELEGTFDQIKNASAMVRELIVSIGGGAPPQGKKPVGGSHRGGGPGSNFKTKLCENFTKGSCTFGDRCHFAHGENELRKSAAA

SEQ ID NO: 1809 - protein, 187 aa, Arabidopsis thaliana
MKLSPPPVTNNEPTATASAVKSCGGGGKETSSSTTRHPVYHGVRKRRWGKWVSEIREPRKKSRIWLGSFPVPEMAAKAYDVAAFCLKGRKAQLNFPEEIEDLPRPSTCTPRDIQVAAAKAANAVKIIKMGDDDVAGIDDGDDFWEGIELPELMMTGGGWSPEPFVAGDDATWLVDGDLYQYQFMACL

SEQ ID NO: 1810 - protein, 142 aa, Arabidopsis thaliana
MSTISPVFSTEPGLLTSVLPAFETSFTPWDISHLFSVFDSLIDPKPVSTHDYGSVNQIGSDMSPTDNTDERKKKRKLSNRESAKRSREKKQKHLEEMSIQLNQLKIQNQELKNQLRSSNCATWPCNNSTVVTVQQDPSIMLS

SEQ ID NO: 1811 - protein, 292 aa, Glycine max
MGEKDDDFGLSLSLSLGRVNQQQQHPPPLNHMHQPQQLQPVPMNHNKTLFGDLSQLPADRSSEMIRGIDVNSAAECDGVSSPNSAVSSVSGGDGKQSERDDDNNAAAVAGERTSCSRGSDDDDGGGSDASRKKLRLTKEQSMVLEETFKEHSTLNPKRKQALAEELNLKPRQVEVWFQNRRARTKLKQTEVDCEYLKRCYENLTEENRRLHKEVQELRALKLSPQMYMHMNPPTTLTICPSCERTHSFASSSTATIHSAVAATSSNRKLFGTNIRLPVSFNTRPFEGPIPRP

SEQ ID NO: 1812 - protein, 149 aa, Vicia faba
MKGGKSKGESKKAETKLAVNKKGAAATKGGKKPAKGKEPKDPNKPKRPPSAFFVFMADFREQYKKDHPNNKSVAAVGKACGEEWKSLSEEEKAPYVDRALKKKEEYEITLQAYNKKLEGKDDEEGSDKSKSEVNDEDEDEEDEEDEDDD

SEQ ID NO: 1813 - protein, 214 aa, Triticum aestivum
MLMKIGCDACGQAEATVLCCADEAALCRRCDAAVHSANKLAGRHHRVALLSSAPAGSSSPGAGDDGGTHPACDICQEKTGHFFCVEDRALLCRSCDVAIHTATPHASTHHRFLITGVRVGVDQDHIGDVSGATVGSPSNSSANGSNSMPTSENFAIANGQRSEEGAGLIGGGEDDIGQQQQWPWSDIFADDGVGMDQHQCYPGFSVPGSSSLTG

SEQ ID NO: 1814 - protein, 176 aa, Dendrobium nobile
GKLYEFSTDSSMEKILERYERYSYAERALFSNEANPQADWHLEYHKLKARVESLQKSQRHLMGEQLDSLSIKELQHLEQQLESSMKHIRSRKTQLILDSISELQKKEKILLEQNKTLEKEIIAKEKAKALTQIAPWEKQNLSQYSSAPLHVISDSVPTPTRTFQARANEEEPPPGT

SEQ ID NO: 1815 - protein, 437 aa, Schizosaccharomyces pombe 972h-
MPPQKYHCNVCAQDITRSIHIRCVECVDFDLCIPCFTSGASLGTHHPSHPYRIIETNSYPIFDENWGADEELLLIDACETLGLGNWADIADYVGNARTKEECRDHYLKTYIESDCYPLASVELPGPVDRIAFAARKRARIEAFQPPPIIPQKPLASTPQCHEIQGYMPGRLEFDQEYMNEAELPIKDMNFDDDLHESAKHEMQLKLTMLNIYNSRLTRRAVRKQTIFNHNLLDYRRLQANEKRMSKEERNLLNKTKAFARLLTGPDYQKFVNSYHEQITLKKQISDLQEWRQMGLTTLEQGHKYERDKTQKFLLSKASASYDKQLRHVKSFNQTTSAPFQVRDIQKIVPRKPATPTMFSASADRQLLSEDEQALCSKLQIFPKPFLALKFALISASLTSKKPFQKTDAVNLFKHLDANKVEQVYDFFHNARWIGAPT

SEQ ID NO: 1816 - protein, 523 aa, Arabidopsis thaliana
MKRSHQETSVEEEAPSMVEKLENGCGGGGDDNMDEFLAVLGYKVRSSDMADVAQKLEQLEMVLSNDIASSSNAFNDTVHYNPSDLSGWAQSMLSDLNYYPDLDPNRICDLRPITDDDECCSSNSNSNKRIRLGPWCDSVTSESTRSVVLIEETGVRLVQALVACAEAVQLENLSLADALVKRVGLLAASQAGAMGKVATYFAEALARRIYRIHPSAAAIDPSFEEILQMNFYDSCPYLKFAHFTANQAILEAVTTSRVVHVIDLGLNQGMQWPALMQALALRPGGPPSFRLTGVGNPSNREGIQELGWKLAQLAQAIGVEFKFNGLTTERLSDLEPDMFETRTESETLVVNSVFELHPVLSQPGSIEKLLATVKAVKPGLVTVVEQEANHNGDVFLDRFNEALHYYSSLFDSLEDGVVIPSQDRVMSEVYLGRQILNLVATEGSDRIERHETLAQWRKRMGSAGFDPVNLGSDAFKQASLLLALSGGGDGYRVEENDGSLMLAWQTKPLIAASAWKLAAELRR

SEQ ID NO: 1817 - protein, 231 aa, Brassica napus
GTTSIKPEMLMSGTGSNEDAKKALSAAKLSELALIDPKRAKRIWANRQSAARSKERKMRYIAELERKVQTLQTEATSLSAQLTLLQRDTNGLSVENNELKLRVQSMEQQFHLQDALNEALKEEVQHLKVLTGQGVSNGASMMSYGGSFGSNQQFYPNNQSRHTMLAAQQFQQLQIQSQKQQQQQLHQQQMYQLQQQRIQQHEQQSGVTELRRPMSSSGLKVSVTSDPEATL

SEQ ID NO: 1818 - protein, 141 aa, Glycine max
QDPTLFQPMKPHFPEQEQLKCPRCDSTNTKFCYYNNYNLSQPRHFCKNCRRYWTKGGALRNIPVGGGSRKNTKRSSSSNNNTKHASPSPPVSSAPAPEIDPTRTDPNPVGGGGSFRSLLASSGHLGLGNLLEGLNSSGSNL

SEQ ID NO: 1819 - protein, 290 aa, Triticum aestivum
  misc_feature (138)..(138): Xaa can be any naturally occurring amino acid
  misc_feature (142)..(142): Xaa can be any naturally occurring amino acid
  misc_feature (152)..(152): Xaa can be any naturally occurring amino acid
MAPARELQETSSSSSSSTSSYTTSSTSMSCSSTVTDSSSCPSSPASAANAVKAAPRKRKLDEGEGGQEETEEGKTTATATTTKKSKRSSDGKHPVYRGVRMRAWGKWVSEIREPRKKSRIWLGTFPTAEMAARAHDVXALAXFKGRAAHLNXFPDLAHELPRPATAAPKDVQAGAALAASADFPASATAAANAGAKNPDGPEHSGASASASASASASASPPPDTAEDALFDLPDLLFDLRHGPPSCQLSCASSWDDDVAFAGPGAGVFRLEEPLQWVLNTIKWEREGGNE

SEQ ID NO: 1820 - protein, 678 aa, Streptococcus pneumoniae
MFASKSERKVHYSIRKFSIGVASVVVASLFLGGVVHAEDVGGRNTPTVTSSGQDISKKYADEVKSHLEEMLSGIQLNRRKHTQNFNFNLKLSKIQTKYLRELSVLKSKSELTLETKKELLSKTKAELDAAFEQFKKDTLKLGEKVAEAEKKVEEAEKKAKAQKEKDRRNYPTNTYKTLELEIAESDVGVKKAELELLKEKAKTRNKDTINQAKAKVESKQAEATRLEKIKTERKEAEEEAKRKADAKLKEAVEKNAVTSEQGELKRRTKRAVPGEPATPDKKEKDAKSSDSSVGEETLSSPSLKPGKKVAEAEKKVEEADKKAKAQKEEDHRNYPTNTYKTLELEIAESDVEVKKAELELVKEEAKEPRNEEKVKQAKAEVESKKAEATRLEKIKTDRKKAEEEAKRKAAEEDKVKEKPAEQPQPQPAPAPQPEKPTEEPENPAPAPKPEKPADHPKAEKTDDQQAEEDYARRSEEEYNRLTQQQPPKTEKPAQPSTPKTGWKQENGMWYFYNTDGSMATGWLQNNGSWYYLNANGAMATGWLQNNGSWYYLNANGSMATGWLQNNGSWYYLNANGAMATGWLQYNGSWYYLNANGDMATGWLQYNGSWYYLNANGDMATGWVKDGDTWYYLEASGAMKASQWFKVSDKWYYVNGSGALAVNTTVDGYGVNANGEWVN

SEQ ID NO: 1821 - protein, 172 aa, Solanum tuberosum
MENYATIFPSASSSSSHHDEYISLMNSKSSISDDAKEELLFQGKNKAGFLGLMASMETPRDIITKKDEVIKSCKKKIKKPRYAFQTRSQVDILDDGYRWRKYGQKAVKNNKFPRSYYRCTHQGCNVKKQVQRLSKDEEVVVTTYEGMHSHPIDKSTDNFEHILSQMQIYTSF

SEQ ID NO: 1822 - protein, 254 aa, Brassica napus
  misc_feature (33)..(33): Xaa can be any naturally occurring amino acid
  misc_feature (210)..(210): Xaa can be any naturally occurring amino acid
  misc_feature (231)..(231): Xaa can be any naturally occurring amino acid
MGRSKLASRPATEDANPGKSKRKKLSSGIENAXGPSISIGGEAGNERKPGLYCCNYCDKDLSGLVRLKCAVCADFDLCVECFYVGVELNRHKSSHPYRVMDNLSFPLVSSDWNADEEILLLEAIATYGFGNWKEVANYVGSKTQTECVDHFNSAYMQSPCFPLPDLSHTNGKSKDELLAMSKEHAVKKVLLDETPPLVNLSPKEELPMSXKIKEEASGKEDSVEQPLPCVXPGVKKKANAPPQTQENIKWKLLK

SEQ ID NO: 1823 - protein, 322 aa, Glycine max
MKRLSSSDSSSALMTICPSTEEHSPRNSQHMYGREFQSMLDGLDEEGCVEEPGYQSEKKRRLSVDQVKALEKNFEVENKLEPERKVKLAQELGLQPRQVAVWFQNRRARWKTKQLERDYGVLKANYDALKLNFDTLDQDNEALRKQVKELKSRLLQEENTGGSGVSVKEEIITRPADSEDKTMEQSKSDPSSETSNINPSSESEEDHLNYECFNNNDDCVGGTAASLLQVDFKDGSSDSDGSSAILNEDNMYSPLKFNNCSISTSPSSSSMMNCFQFQKPYHHHAQYVKMEEHNFLSADEACNFFSDEQAPTLQWYCPEQWS

SEQ ID NO: 1824 - protein, 242 aa, Arabidopsis thaliana
MLPTTLLSLPLTLTSMLLYIYLSPLFSKTHQPAHQEQEQEEEEQDKKNKVPKKTHREGNTKIDIDPKAMAYEKVNELNLKDTELCLGLPGRTEKIKEEQEVSCVKSNNKRLFEETRDEEESTPPTKTQIVGWPPVRSSRKNNNSVSYVKVSMDGAPYLRKIDLKTYKNYPELLKALENMFKVMIGEYCEREGYKGSGFVPTYEDKDGDWMLVGDVPWDMFSSSCKRLRIMKGSDAPALDSSL

SEQ ID NO: 1825 - protein, 570 aa, Oryza sativa (japonica cultivar-group)
MGRSRGVPNSGDDETNHRSKRRRVASSGDAPDSLSAACGGAGEGGGKKALYHCNYCNKDISGKIRIKCSKCPDFDLCVECFSVGAEVTPHRSNHPYRVMDNLSFPLICPDWNADEEILLLEGIEMYGLGNWAEVAEHVGTKTKAQCIDHYTTAYMNSPCYPLPDMSHVNGKNRKELLAMAKVQGESKKGTSVLPGDLTPKDESPFSPPRVKVEDALGEGLAGRSPSHIAGGANKKASNVGQFKDGANVAKVEDGHVDRSIGVKKPRYSADEGPSLTELSGYNSKRHEFDPEYDNDAEQALAEMEFKETDSETDRELKLRVLRIYLSRLDERKRRKEFILERNLLFPNPLEKDLTNEDKEVYHRYKVFMRFLSKEEHEALVRSVLEERKIRRRIQELQECRSAGCRTLAEAKIHIEQKRKKEHEVNAQKAKESGQLLSNTKVVHKTNRPMKIESDGNLDQKKGGASLDSTGRDSPKTTGHAGTKHWDDWDIVGFPGAELLSTSEKNLCCQNRLLPNHYLKMQEVLMQEIFKGSVAKKEDAHVLFKVDPAKVDNVYDMVTKKLGTNEEAPTV

SEQ ID NO: 1826 - protein, 88 aa, Zea mays
MSGSRSSSSHNVTIDSEWSKKENKLFEEALACYGAGTPDRWHKVARAMGGIKTADEVRRHHEILNEDVTLIESGRVPFPNYNTQGAWN

SEQ ID NO: 1827 - protein, 203 aa, Arabidopsis thaliana
MVRGKIEIKKIENVTSRQVTFSKRRSGLFKKAHELSVLCDAQVAAMIFSQKGRLYEFASSDIRNTIKRYAEYKREYFVAETHPIEQYVQGLKKEMVTMVKKIEVLEVHNRKMMGQSLDSCSVKELSEIATQIEKSLHMVRLRKAKLYEDELQKLKAKERELKDERVRLSLKVGERPMGMPSGSKEKEDVETDLFIGFLKNRPG

SEQ ID NO: 1828 - protein, 222 aa, Triticum aestivum
RKNKRKKEKDPSKPKQPMPAYFLYSQERRAALAAEKKSVPEIGKITGEEWKGMTEAQKVPYEEVARKQKEEYQKQMEVYKQKKLEENASLEKEEEEQKKILKQEALQLLRKKEKADNIIKKTKEKRQKKKQQQNADPNRPKRPASSFLLFSKEARKQLAEERPGVNNATLSALISVKWKDLSGAEKKVWSEKAAQGMAAYKREMEEYTKAHTSASSSPTATA

SEQ ID NO: 1829 - protein, 281 aa, Physcomitrella patens subsp. patens
MGRGKIEIKKIENTTSRQVTFSKRRGGLLKKAHELAVLCDAEVALVIFSSTGKHFEFASSGSMRDIIERYRKSSDGAVKRGTNTDLLGREVIKLKQQVERLESSQRHMLGEDLSALKVSDLLELEQQLDQGASRVRARKNQLILEEIEDLRRKEHELMIANEALRKKIADAEGAAEAAARANFPDARLESPKPFASDFSRDMSVSSQLAASVYPHPNLLQAQRSQTSLQLGWLSEQQIPSTEEGCAGESSLKWDHPHFHIQNRLHANISPSVRTYKLHVDR

SEQ ID NO: 1830 - protein, 193 aa, Medicago truncatula
MRMGAEVDGSLGDSDGLKESGSKKRVRSESCAATSSKACREKLRRDRLNDKFIELGSILEPGRPAKTDKAAILIDAVRMVTQLRGEAQKLKDANSGLQEKIKELKVEKNELRDEKQRLKAEKEKLEQQLKSMNAPPSFLPTPTALPAAFAAQGQAHGNKLVPFISYPGVAMWQFMPPAAVDTSQDHVLRPPVA

SEQ ID NO: 1831 - protein, 239 aa, Phalaenopsis equestris
MDSSSMEPKEKMGRGKIEIKRIENTTNRQVTFCKRRNGLLKKAYELSVLCDAEVALIIFSTRGRLYEYANNSVKGTIERYKKASTDNSNTGSISEANSQYYQQEATKLRQQITNLQNSNRNLLGDALTTMSLRDLKQLETRLEKGINKIRAKKNELLHAEIDYMQKREMELQTDNMFLRNKISDNERAQQQHQHMSILPSTSTEYEVMPPFDSRSFLHVNLMDPNDRYSHQQQTALQLG

SEQ ID NO: 1832 - protein, 364 aa, Physcomitrella patens
MPKSCDACHISSAVVYCRADAAYLCAGCDGKVHGANKLASRHERVWMCEVCEVAVAVVTCKADAASLCVSCDTDIHSANPLAQRHERVPVQPLFDCASSAREAHISVPFPESECHETLKGVEDSCVAEAGSWLLPHPKIPTNAIIRGSAAADEAPDSPFRARPFSPKLKKQKVDLAADIFSDVDPFLELDDATVTGIQPDSLVPVHIPEGSEDSPSLAHSMEPSFTTDFHLSEKSGYSFGTSTLTHSISCSSVDAAVVPDSSLSDISTPYPLDSQGAQELSGTRMPQQVSGPIDTVDREARVMRYKEKRQKRKFEKTIRYASRKAYAESRPRIKGRFAKRTDSDVEQLFSSCSMDSSFGVVPSF

SEQ ID NO: 1833 - protein, 305 aa, Oryza sativa
  misc_feature (79)..(79): Xaa can be any naturally occurring amino acid
MSGGQDLQLPPGFRFHPTDEELVMHYLCRRCAGLPIAVPIIAEIDLYKFDPWQLPRTIILLLHPPNHHHHQRRRELIDXFGLICWCCVGMALYGEKEWYFFSPRDRKYPNGSRPNRAAGSGYWKATGADKPVGSPKPVAIKKALVFYAGKAPKGEKTNWIMHEYRLADVDRSARKKNSLRLDDWVLCRIYNKKGGLEKPPAAAVAAAGMVSNGGGVERKPMVGVNAAVSSPPEQKPVVAGPAFPDLAAYYDRPSDSMPRLHADSSCSEQVLSPEFACEVQSQPKIRKMVQLHRVACQCVCIVACT

SEQ ID NO: 1834 - protein, 85 aa, Oryza sativa
  misc_feature (56)..(56): Xaa can be any naturally occurring amino acid
  misc_feature (65)..(65): Xaa can be any naturally occurring amino acid
  misc_feature (67)..(67): Xaa can be any naturally occurring amino acid
MGSSWTLDQNKVFELALATYGKDTPDRWENVARAVGGGKTEDDAKRYYKKLENDIXRIDLTGGRXSXFNGRSRSEGKRCCKCQGW

SEQ ID NO: 1835 - protein, 542 aa, Lotus japonicus
MTMEPNSTTSDHILDWLEGSVSFFPSFLDEPCNNSGYIQEYHLWDQYQTDANTGSSPNATNSTTATIVATSATSTTSLEPCGSNNNQPLSDLPKKRNATDESSLKPPQNKNKRIKTRPMNEPENGDAVRKNKKGGAKANGSNCNSGNSKEGRWAEQLLNPCAAAIAGGNVNRVQHLLYVLHELASPTGDPNHRLAAHGLRALTHHLSSSSSSPTSSGTITFASTEPRFFQKSLLKFYEVSPWFSFPNNIANASILQVLAEEANITSRTLHILDIGVSHGVQWPTLLDALSRRSGGPPSVVRLTVVTAENDQNMETPFSKAPPGYNYYPRLLGYAQSININLQINRIENHSLQTLNAQSISASPDEILIVCAQFRLHHLNHNSPDERSEFLKVLRNMEPRGVILSENNTECCCSGCGNFAAGFTRRVEYLWRFLDSTSSAFKGRESDERRVMEGEAAKALTNQREMNEEKEKWCGRMKEAGFAGEVFGEDAVDGGRALLRKYDSNWEMKVEEKNTSVGLWWKGQPVSFCSLWKLDGNDQGGTS

SEQ ID NO: 1836 - protein, 246 aa, Malus x domestica
MGRGRVELKRIENKINRQVTFAKRRNGLLKKAYELSVLCDAEVALIIFSNRGKLYEFCSSSSMLKTLDRYQKCSYGAVDQVNRPAKELESSYREYMKLKGRYESLQRTQRNLLGEDLGPLNTKELEQLERQLEGSLKQVRSTKTQYMLDQLSDLQNKEQLLIEANRDLTMKLDEISSRNQLRQSWEGGDQGMAYATQHHHAQSQGFFQPLDCNPTLQMGYSAVGSEQMSATTNAQQVNCFIPGWML

SEQ ID NO: 1837 - protein, 188 aa, Glycine max
MENYSMLFSVSNSSSYPIGVGSSQIGYSGQSSNAFLGLRPSNELASDDHEKRQGGGDGNMLMSQISGGSINVSDELGGSGNSNNNKKKGEKKVRKPRYAFQTRSQVDILDDGYRWRKYGQKAVKNNKFPRSYYRCTHQGCNVKKQVQRLTKDEGVVVTTYEGVHTHPIEKTTDNFEHILGQMQIYTPF

SEQ ID NO: 1838 - protein, 226 aa, Arabidopsis thaliana
SGKPLGSMNLDELLKTVLPPAEEGLVRQGSLTLPRDLSKKTVDEVWRDIQQDKNGNGTSTTTTHKQPTLGEITLEDLLLRAGVVTETVVPQENVVNIASNGQWVEYHHQPQQQQGFMTYPVCEMQDMVMMGGLSDTPQAPGRKRVAGEIVEKTVERRQKRMIKNRESAARSRARKQAYTHELEIKVSRLEEENEKLRRLKEVEKILPSEPPPDPKWKLRRTNSASL

SEQ ID NO: 1839 - protein, 240 aa, Arabidopsis thaliana
MGNQKLKWTAEEEEALLAGVRKHGPGKWKNILRDPELAEQLSSRSNIDLKDKWRNLSVAPGIQGSKDKIRTPKIKAAAFHLAAAAAAAIVTPTHSGHSSPVATLPRSGSSDLSIDDSFNIVVDPKNAPRYDGMIFEALSNLTDANGSDVSAIFNFIEQRQEVPPNFRRMLSSRLRRLAAQGKLEKQIVEASITAAYKLVEVENKLDVSKGAAEEIERLMKLAEEADEMLVIAREMHEECK

SEQ ID NO: 1840 - protein, 256 aa, Citrus sinensis
MGRGRVQLKRIENKINRQVTFSKRRAGLLKKAHEISVLCDAEVALVVFSHKGKLFEYSTDSCMEKILERYERYSYAERQLIAPESDVNTNWSMEYNRLKAKIELLERNQRHYLGEDLQAMSPKELQNLEQQLDTALKHIRTRKNQLMYESINELQKKEKAIQEQNSMLFKQIKEREKIFRAQQEQWDQQNQGPNMPPPLPPQQHQIQHPYMLFHQPFPFFNMGGLYQEDDPMAMRRNDLELTFEPVYNCNLGCFAA

SEQ ID NO: 1841 - protein, 306 aa, Schizosaccharomyces pombe 972h-
MHLSAHIDPLQIILCTEIDEACIQFIKSQIEGIARACGPRMQANFEGVLIPYVDVLGKFLYRACCLRYATMGEEAARIVLAKQDRSKGLVLATTGERMTSLIFSLVIDLVGVHVNKLLKQASYSSSFKLPFGLRNLLPEAVISKEKHLVYILNSFKPILLKLVSIIRFLCLTMKGHCATVSQLLLGLKYISLDEINPEEKKKVLTLLLLLGSRLIASILQHSNSYFDQHTISSITDERDLEDKNKLPFIPEGNRKCSLCMEFIHCPAATECGHIFCWSCINGWTSKKSECPLCRAFSSPSKIILLR

SEQ ID NO: 1842 - protein, 264 aa, Citrus sinensis
MEAQASTELPPGFRFHPTDEELIVHYLRNQATSRPCPVSIIPEVDIYKFDPWQLPEKAEFGEKEWYFFSPRDRKYPNGTRPNRATVSGYWKATGTDKAIYGGSKYLGVKKALVFYKGRPPKGIKTDWIMHEYRLNDPTRQPYKHNGSMKLDDWVLCRIYKKRQTGSRSVLDAKVEEDQSCVDQLGKTGGYVEHANASDEQKLMVKFPRTCSLAHLVELEYFAPISQLLNDNTYNFNYDFQNGINNNAASDDQFEINFSQVTCTK

SEQ ID NO: 1843 - protein, 515 aa, Triticum aestivum
  misc_feature (56)..(56): Xaa can be any naturally occurring amino acid
EYRVECGQWGARFPHVAGIAGQSEHGAQSVALSGGYIDDEDHGEWFLYTGSGGRDXLSGNKRTNKEQSSDQKFDKMNAALRLSCKKGYPVRVVRSHKEKRSSYAPETGVRYDGVYRIEKCWRKIGVQGTYKVCRYLFVRCDNEPAPWTSDLHGDRPRPLPRIKELQGATDITERAGSPSWDYVENEGWKWVKPPPISKKPAQSGDPETDKQFRKYQKRAHMSMNERLLKEFGCSICKNLMKEPLTTPCGHNFCKACLTAAFGDEGSMRERSRGGRTLRAQKIVKNCPSCPTDICDFLENPQINIEMKDLIDNLLAKAAKEKPDAEGSAEENDDEEDALEKEEEDDSSLNEEENDDGAENKAGEEDAVVTIVVEAKDELKKPLKRQGDQEEEAKDEKKIQTTAAADAENAAEEDAEMVENKEEEGAQKVQKKRKGRAETATAAAGGGKRKRAGPAAAEEKAAAAGGGKRKKASPAAAAEETPAAASTPRRATRSGGVVVAGGSPASRTRSNTKADN

SEQ ID NO: 1844 - protein, 197 aa, Raphanus sativus
MGRKKLEIKRIEKKSSRQVTFSKRRSGLIEKARQLSVLCDASVALLVVSSSGKLYSFSSGDNLVRILHRYEKQHADDLKALLDLQSKSLSYGSHNELLELVESKLVESNVGVSVDALVQLEGHLETALSLTRARKTELMLKLVDSLKEKEKLLKEENKVLASQMEKNNLAGAEADNMEIARAQISDINLPVTLPLLN

SEQ ID NO: 1845 - protein, 446 aa, Arabidopsis thaliana
MRTDQVMLSNKNTNTCCVVSSSSSDPFLSSSENGVTTTNTSTQKRKRRPAGTPDPDAEVVSLSPRTLLESDRYICEICNQGFQRDQNLQMHRRRHKVPWKLLKRDNNIEVKKRVYVCPEPTCLHHNPCHALGDLVGIKKHFRRKHSNHKQWVCERCSKGYAVQSDYKAHLKTCGTRGHSCDCGFFSSFRVESFIEHQDNCSARRVHREPPRPPQTAVTVPACSSRTASTVSTPSSETNYGGTVAVTTPQPLEGRPIHQRISSSILTNSSNNLNLELQLLPLSSNQNPNQENQQQKVKEPSHHHNHNHDTTNLNLSIAPSSSYQHYNNFDRIKEIMASEQIMKIAMKEKAYAEEAKREAKRQREIAENEFANAKKIRQKAQAELERAKFLKEQSMKKISSTIMQVTCQTCKGQFQAVAVPAATADETSLVVSYMSSANTDGELENGF

SEQ ID NO: 1846 - protein, 221 aa, Glycine max
MGRGKIVIRRIDNSTSRQVTFSKRRNGLVKKARELSILCDAEVGLIVFSSTGKLYDYASTSMKSVIERYNKVKEDHQQLINPASEVKLWQREVASLRQQVQYMQECHRQMMGQELSGLGIEELGNLEKRLEMSLKGVRMKKDQILIDEVKELHQKGSLAHQENVELNRKINLIRKENEELQKVIEAKCRKGVAASNPPFTINYGCNMLAPISLQLSLPEST

SEQ ID NO: 1847 - protein, 258 aa, Arabidopsis thaliana
MTEGGEYSPAMMSAEPFLTMKKMKKSNHNKNNQRRFSDEQIKSLEMMFESETRLEPRKKVQLARELGLQPRQVAIWFQNKRARWKSKQLETEYNILRQNYDNLASQFESLKKEKQALVSELQRLKEATQKKTQEEERQCSGDQAVVALSSTHHESENEENRRRKPEEVRPEMEMKDDKGHHGVMCDHHDYEDDDNGYSNNIKREYFGGFEEEPDHLMNIVEPADSCLTSSDDWRGFKSDTTTLLDQSSNNYPWRDFWS

SEQ ID NO: 1848 - protein, 522 aa, Cryptococcus neoformans var. neoformans JEC21
MSSDGENEDLAYEDDYDVFDADDVMDDSASEPDDFDVLSPTIETVPSKKPYDVNYTVYDLKEIIGMQKKMIDEVAALLVIPASTAAALLRHFNWNTEKLQEVFWTEPDATLLAAGLSPPSSPSTSTQPLPGSQSGSFECPICFTDYEGKSAQQDTFAMGCGHRFCKTCWGEYLTGKIKEEGESGRIQCMESGCKRVVKGEMVKELAGDKISDRYYNLLNAAFVSDSPNLRWCPHPDCPYIIGCTQAPQRMLNQLVPTVECECGKDLCFGCGYAASHRPVICKIVRLWEKKCADDSETANWLQANTKECTKCQSTIEKNGGCNHMTCKKCKWEFCWVCMGPWSEHGTNWYQCNRFDEKSGIDARDVQAKSRASLERYLHYFNRWANHEHSAKLDTEFYAKTEKKMEQMQDAGNLSWIEVQFAKQAVDAVIRARITLKWTYCMAFYLKRNNQTELFEDNQRDLERAVENLSYLLEQNIGEPESIAKLRHDVTNQAAYVQKRHEIMMDDTLRGHLEHRWEFTVDV

SEQ ID NO: 1849 - protein, 368 aa, Physcomitrella patens
MPKSCDACQASSAVVYCRADAAYLCLGCDGKVHGANKLASRHERLWMCEVCEVAAAVVTCKADAASLCVSCDTDIHSANPLAQRHERVPVQPLFDCVSQFRGTHFSVLAPKNECNNNLLKGDEDPAVAEAVSWLLPHPKTLSSAILRGIAAADEAPAFPFRERPFSPKLKKLKVEQAADIYSDVDPFLVLDGGNGTGFQPDSLVPVHIPEGPDDSPSLANSTAPSSAINFRASQKSGCSYGTSTLTHSMSCSSVDAAVVPDSSLSDISTPYSKALDSQDSQDLSGALVPHQASKPIDTVDREARVMRCKEKRQKRKFEKTIRYASRKAYAESRPRIKGRFTKRTDSDVEQMFSSCTADSGFGVVPSSC

SEQ ID NO: 1850 - protein, 204 aa, Brassica napus
  misc_feature (196)..(196): Xaa can be any naturally occurring amino acid
MEDVAMKNAELNEEISDKFLCCVCLELLYKPIVLSCGHLSCFWCVHKSMNELRESHCPICRDPYVHFPAVCQKLHFLLKKIYPLAHHKREEQVLKEEQELDCFSPQIDEPKPKEESSCSGASLNVSDERKVEECSNAERLLSSEEPNENNKVITQISKDDLLCSACKELLVRPVVLNCGHVYCEGCVVDMFQEGEXIKCQECHI

SEQ ID NO: 1851 - protein, 115 aa, Coccidioides immitis RS
MGAIRRSKTKRRTRDYDQVRNDIDSARHLELYKETKDVEDLPGLGQYYCVECSKWFESEYNLTAHRKGKNHKRRIRLLKEEPHTQKLAEAAVGLTSDNGKRGDGDAMQITESNEG

SEQ ID NO: 1852 - protein, 321 aa, Glycine max
MKWEMEILPPASPYMYNSNWLLDDNRTNNTKWTPAENKLFENALAVYDRDTPDRWHKVAEMIPGKTVMDVVKQYKELEADVCDIEAGLIPIPGYSSGTTTTSPFTLDWVNTSPAYDDGFKGITAKRSSSGRPLEQERKKGVPWTEEEHKLFLLGLKKYGKGDWRNISRNYVITRTPTQVASHAQKYFIRQLSGGKDKRRASIHDITTVNLTETTRTSSDESKRSASPQNSAMLSRHQQLNSNAASSGLNFQWSDQPNAGVAMALNPAHEQVFMSPYGLNSYGFKMQGQNLHRSSLHESSYLGPQTPNMVFQMQPSQHYSHA

SEQ ID NO: 1853 - protein, 360 aa, Oryza sativa (indica cultivar-group)
MGRESVAACSPKPKLRRGLWSPEEDEKLFNHISRYGVGCWSSVPKLAGLERCGKSCRLRWINYLRPDLKRGSFSQQEEELIISLHKILGNRWSQIASQLPGRTDNEIKNFWNSCLKKKLRQRGIDPATHKPLNDGGAGAEEEHHDDGDKQQQQQLMDDVDDCFAIGGGGSSDSLAPPHSPAVSFDPLSVTNVPTTMMQSSSSPYGAAGGEHSSFRSDTLCDYGGSGGGVDVVSDAGTYSAYTGDSSSNSNSTAWTCSSVVVGGAGELPPPPLLPHMDMFGRVDAEPPPYPPFDVPARFSPWHHHHHHHHEPTLPTPPQRLDGGGGAAASFPIRSLSRDMPESCFDLGRGALDDEFGVDFL

SEQ ID NO: 1854 - protein, 179 aa, Gossypium hirsutum
MLVFGYLRDALTVGWAPSDHSSPTFPPIKPEPQEIPTETAVKEVPTVANAAVPTVVPAKGKHYRGVRQRPWGKFAAEIRDPAKNGARVWLGTFETAEDAALAYDKAAYRMRGSRALLNFPLRVNSGEPDPVRITSKRATPEPSTSSSSGSENGSPKRRRKVGSAAPVVAQAGLNMGFGA

SEQ ID NO: 1855 - protein, 359 aa, Zea mays
MKVLCSACEAAEARLLCCADEAALCARCDRDVHAANRLAGKHHRLPLLPPDDVSAPNCDICQEAHAYFFCVEDRALLCRACDMAVHTANAFVSAHRRFLLTGVQVGLQPAAAAQDADPHPPAAAEPLQTPPPPDRKAAAAGDGSSPALLYSDDDIDWAAGADAGGGVSVAVTLPDWSLVHEQFGAPPVVPRHADPALARTPSSKRSPRRSVAAAFTVQGGGGLAGGLPDWPLDEFFGFSEYSAGLAFAENDTSKRSVFHWQADSGKLGSTDGSPAGRPSSDASQDFFGQVPEFHQWSVPELPSPPTASGLHWQGGPRHGAATTTDVAAVFVPDISSPENPFWCYATAAGQAPTKRRRRC

SEQ ID NO: 1856 - protein, 208 aa, Oryza sativa (indica cultivar-group)
MGRESAAACSPKPKLRRGLWSPEEDEKLFNHISRYGVGCWSSVPKLAGLERCGKSCRLRWINYLRPDLKRGSFSQQEEELIISLHKILGNRWSQIAAQLPGRTDNEIKNFWNSCLKKKLRQRGIDPATHKPLNDGGAGAGEEHHDDGDKQQLMDDVDDCFAIGGGGSSDSLAPPHSPAVSFDPLSVTNLAVPMSEAVARRLQEAKERL

SEQ ID NO: 1857 - protein, 208 aa, Arabidopsis thaliana
MSTTAATVAGGAAQPGQLAFHQIHQQQQQQQLAQQLQAFWENQFKEIEKTTDFKNHSLPLARIKKIMKADEDVRMISAEAPVVFARACEMFILELTLRSWNHTEENKRRTLQKNDIAAAVTRTDIFDFLVDIVPREDLRDEVLGSIPRGTVPEAAAAGYPYGYLPAGTAPIGNPGMVMGNPGGAYPPNPYMGQPMWQQQAPDQPDQEN

SEQ ID NO: 1858 - protein, 342 aa, Populus trichocarpa
QPIRQRRTGKKDRHSKIHTAQGPRDRRMRLSLQIARKFFDLQDMLGFDKASKTIEWLFTKSKAAIKELTDTVPKVRKCSSTSAGKSVSSTSESEVVSGIKLTPDTNGDRRVMEAKSDSLVSKPKEKRSKKVHKPVFNPVDRESREKARARARDRTREKMKNKGINKSSQSSQANPDNLEKFGYSSTLEYGENLASGRQEINSSVKVVDEEEESNNHHHLLPHQMDHVSIIDKFFGITNSPRSSSIFDFSESIEVPSGATLKDEFSGFPLKWDVTNGRVQYKYNALPNMKLPSGNVQAQNPNVNFMTTPHALEPNLSTMIMTTLNAHVEESPNSAFVNMPNPN

SEQ ID NO: 1859 - protein, 236 aa, Oryza sativa
MGRGKIEIKRIENTTNRQVTFCKRRNGLLKKAYELSVLCDAEVALIVFSSRGRLYEYANNSVKSTVERYKKANSDTSNSGTVAEVNAQHYQQESSKLRQQISSLQNANSRTIVGDSINTMSLRDLKQVENRLEKGIAKIRARKNELLYAEVEYMQKREVELQNDNMYLRSKVVENERGQQPLNMMGAASTSEYDHMVNNPYDSRNFLQVNIMQQPQHYAHQLQPTTLQLGQQPAFN

SEQ ID NO: 1860 - protein, 277 aa, Glycine max
  misc_feature (232)..(232): Xaa can be any naturally occurring amino acid
MEGSTTSSELPPGFRFHPTDEELIVYYLCNQATSKPCPASIIPEVDLYKFDPWELPDKTEFGENEWYFFSPRDRKYPNGVRPNRATVSGYWKATGTDKAIYSGSKNVGVKKSLVFYKGRPPKGAKTDWIMHEYRLAESKIPASRKIGSMRLDDWVLCRIYKKKSMVKALEHKEAHPEVQIANLAPANHDVEQKMMNLPRTWSLTYLLDMNYLGPILSDGSYCSTLDFQINNXGLDPFVKSQPVEMNNYVADSGKYQVKQSSTIDQPIYVKQMYDLLG

SEQ ID NO: 1861 - protein, 617 aa, Arabidopsis thaliana
MAIETQLPCDGDGVCMRCQVNPPSEETLTCGTCVTPWHVPCLLPESLASSTGEWECPDCSGVVVPSAAPGTGNARPESSGSVLVAAIRAIQADETLTEAEKAKKRQKLMSGGGDDGVDEEEKKKLEIFCSICIQLPERPITTPCGHNFCLKCFEKWAVGQGKLTCMICRSKIPRHVAKNPRINLALVSAIRLANVTKCSVEATAAKVHHIIRNQDRPEKAFTTERAVKTGKANAASGKFFVTIPRDHFGPIPAENDVTRKQGVLVGESWEDRQECRQWGAHFPHIAGIAGQSAVGAQSVALSGGYDDDEDHGEWFLYTGSGGRDLSGNKRINKKQSSDQAFKNMNESLRLSCKMGYPVRVVRSWKEKRSAYAPAEGVRYDGVYRIEKCWSNVGVQGSFKVCRYLFVRCDNEPAPWTSDEHGDRPRPLPNVPELETAADQFVRKESPSWDFDEAEGRWKWMKSPPVSRMALDPEERKKNKRAKNTMKARLLKEFSCQICREVLSLPVTTPCAHNFCKACLEAKFAGITQLRERSNGGRKLRAKKNIMTCPCCTTDLSEFLQNPQVNREMMEIIENFKKSEEEADASISEEEEEESEPPTKKIKMDNNSVGGSGTSLSA

SEQ ID NO: 1862 - protein, 222 aa, Gossypium hirsutum
MAPQDKNASKILKKANVTGSTSSQSVHFRGVRKRPWGMYAAEIRDPGKKSRVWLGTFDTAEEAARAYDAAAREFRGPKANTNFPLPDETNCYKGQNQQSPIHSITVEESGSPTVERGVNTVTGAVGRFPFACHQQLALGGGVANGGISGVTQSRTVLFFEALGGAGVVGQVYPGRLDPVGVHLGMGFASVVRSEPDSSSDIHCKAKRPGLDLDLNLPPPVDA

SEQ ID NO: 1863 - protein, 625 aa, Oryza sativa (indica cultivar-group)
MKREYQEAGGSSGGGSSADMGSCKDKVMAGAAGEEEDVDELLAALGYKVRSSDMADVAQKLEQLEMAMGMAGVSAPGAADDGFVSHLATDTVHYNPSDLSSWVESMLSELNAPLPPIPPAPPAARHASTSSTVTGGGGSGFFELPAAADSSSSTYALRPISLPVVATADPSAADSARDTKRMRTGGGSTSSSSSSSSSLGGGASRGSVVEAAPPAMQGAAAANAPAVPVVVVDTQEAGIRLVHALLACAEAVQQENFAAAEALVKQIPTLAASQGGAMRKVAAYFGEALARRVYRFRPADSTLLDAAFADLLHAHFYESCPYLKFAHFTANQAILEAFAGCRRVHVVDFGIKQGMQWPALLQALALRPGGPPSFRLTGVGPPQPDETDALQQVGWKLAQFAHTIRVDFQYRGLVAATLADLEPFMLQPEGEADANEEPEVIAVNSVFELHRLLAQPGALEKVLGTVHAVRPRIVTVVEQEANHNSGSFLDRFTESLHYYSTMFDSLEGGSSGQAELSPPAAGGGGGTDQVMSEVYLGRQICNVVACEGAERTERHETLGQWRNRLGRAGFEPVHLGSNAYKQASTLLALFAGGDGYRVEEKEGCLTLGWHTRPLIATSAWRVAAA

SEQ ID NO: 1864 - protein, 157 aa, Glycine max
VKPPPHFPEQEQLQCPRCNSNNTKFCYYNNYNLSQPRHFCKNCRRYWTKGGALRNIPVGGGSRKTTKRSSSTSKRSSAPSSSSSAVSDPDPTRNCTNPVDQDQRVLNIGGGSFSSLLASSGHFGTLLEGLNPTGSSLKMGEFGEGVSSDPGLNLVSG

SEQ ID NO: 1865 - protein, 285 aa, Glycine max
MNPSSGQPQQMSSQSVEKKPKPHPEQALKCPRCDSTNTKFCYYNNYSLSQPRYFCKSCRRYWTKGGTLRNVPVGGGCRKKRSSSLKRAQGQTLTPNLNPLTTLPHLSYDSNDFTLAVARFQKQSSGQLGYNDRDLSTLGNPTTGSFCDILGNSGMNPSSANPSFLDAIRTGFLETQNHLQNLYCMYGNGDLGEVDNGNSGVVGVSGEMMLPYDQVIMSNATTQSVSVMKQEMCSRREQSERRVLGGFPWQINADTNIGELDSGRTIASWNSFTNSWHGFLQSPLM

SEQ ID NO: 1866 - protein, 435 aa, Zea mays
MGEGRAGDGLIKLFGKTIPVPETAAVGEAAKDIQQSGGSGSGTTDPKGQENNVQDSTGSPPQQEVADTEDSSADKQQGEAGNPKEKLKKPDKILPCPRCNSMDTKFCYYNNYNINQPRHFCKNCQRYWTAGGAMRNVPVGAGRRKSKSASATSHFLQRVRAGLPVDPLVCAAAKTNGTVLSFGSAMSSLDLTEQMKQLKEKLVPIAGDERSVGSRTQGPSAKAEDPDRKENVTADKSARVVQHPCMTNGVAMWPFSCAPPVPASACYGPGSIAIPFYPAAAAAAAAAAYWGCMVPGAWSGAWPPHSGQSETGSSITSASPAASTKSNICFTPGKHPRDRDEEGGAKGNGKVWVPKTIRIDDVDEVARSSILSLIGIGGDKAGKDGGRGCKLARVFEQNEEAARTATPHSAAINGLPFLQGNPAALSRSLTFQEGS

SEQ ID NO: 1867 - protein, 400 aa, Zea mays
MVQQPRINSAIVSAIRAARMSKNTNPAAAGSSAGSHHYIQNVDRPDRAYTTERAKRGGKANASSGQIFVTTAPDHFGPILAEHDPRRNTGVRVGETWEDRLECRQWGAHLPHIAGIAGQSRFGAQSVALSGGYEDDEDHGEWFLYTGSGGRDLSGNKRTNKEQGFDQTFVKMNEALRQSCLRGYPVRVVRSHKEKRSSYAPELGVRYDGIYRIEKCWRKIGVQGTFKVCRYLFVRCDNEPAPWTSDDHGDRPRPLPNIPELKDATDINERDERPSWGYDEKEGRWKWMYEPPTSRKPVRTGLRPKTGKQARKRARSDEMPNDPEKLLNEFSCCICFQVMAEPLTAPCGDSFCKACLLGAYDNQSSVRERSCGGRTLRAQKIVKTCPSCPTDICDFLENPQ

SEQ ID NO: 1868 - protein, 83 aa, Taraxacum officinale
ELRDEKQRLKIEKEKLEQQVNTMNAQPPSFMPHHPPAIPTYGGHAIGNKLVPIMSYPGMAMWQFMPPAAVDTSQDHVLHPPVT

SEQ ID NO: 1869 - protein, 110 aa, Musa x paradisiaca
ACAEAVQPVSLKAADALVKQITLLTTSQGGAMRKVAGYFAEALARRIYRPQPHRGVGCSSQDSAALDNILHVHFYESSPYLKFAQLTANQAILEALRANSFKPAGLDFRP

SEQ ID NO: 1870 - protein, 197 aa, Anemone nemorosa
NGILKKARELTVLCDAQVSLIMFSCTGKLAEYISPSTTPKKLYDQYQKSTGVDLWNSQYEKLKESLKQQKEINMKLRKEIGQRTGMESLDGESFEKLRSLEQDLDGTSKMVRERKFHMISTQTETTRKKIRSQQEIYKRMVREIEARGEVLYYEGNLESIMAMSNGGGEDFVAYQLQPNLQEVEDFGSYGFQLAQPN

SEQ ID NO: 1871 - protein, 94 aa, Musa x paradisiaca
ACAEAVQQENLKAADALVKHISVLAASQDGPMRKVAGYFAEAIARRIYRRRPLSQVDRALDSPALEDLLHLHGYESCPYLKFAHFKGNQAILEA

SEQ ID NO: 1872 - protein, 150 aa, Solanum lycopersicum
PGRTDEESDKEIVFHFKNNKRALLKDEDCESNSISDPKTPPVAKTQIVGWPPVRANRKNSFPSKKAEAECGMYVKVSMDGAPYLRKIDLKLYKGYPELLKALEKMFKLSIGEYSEREGYKGSEFAPAYEDKDGDLMLVGDVPFEMFLSSC

SEQ ID NO: 1873 - protein, 105 aa, Musa x paradisiaca
ACAEAVQQENLKAADALVKHISVLAASQDGPMRKVAGYFAEAVARRIYRRRPLSQVDRALDSPALEDLLHLHFYESCPYLKFAHFTANQAILEALRANSFKPAGL

SEQ ID NO: 1874 - protein, 288 aa, Zea mays
MGAPKQKWTSEEEDALRAGVRKHGAGKWRTIQKDPEFSPVLSSRSNIDLKDKWRNLSFSASGLGSSKLRVPKITGPSSSPSSSSQPLLLPAANKFTEATLPADAEKKPQDGKTLPKYGAMIMEALLELNEPNGSDIAAIFGFIEQRYAVQPTFRRFLASKLRRLADSNKIEKIDKSYRLPDSLATRTPAPMNASAPKQKDPSKPSKVSKAIGLFSASSPALEAAMAAAVKVADAEAKAHDAHDQTMEAERIFKMAEDTESLLIIAAEIYDRCSRGEITTLVPVAQREI

SEQ ID NO: 1875 - protein, 618 aa, Oryza sativa (indica cultivar-group)
MLAGCSFSSSRHQMSTAQRFDILPCGFSKRGSRGDGAAPRVAGDARSGATTCSFRTHPAPPVTQSVSWGAKPEPGGNGNGAHRAVKRAHDEDAVEEYGPIVRAKRTRMGGDGDEVWFHQSIAGTMQATAAGEGEEAEEEKVFLVPSAAAFPHGMAAAGPSLAAAKKEEYSKSPSDSSSSSGTDGGSSAMMPPPQPPEFDARNGVPAPGQAEREALELVRALTACADSLSAGNHEAANYYYLARLGEMASPAGPTPMHRVAAYFTEALALRVVRMWPHMFDIGPPRELTDDAFGGGDDDAMALRILNAITPIPRFLHFTLNERLLREFEGHERVHVIDFDIKQGLQWPGLLQSLAARAVPPAHVRITGVGESRQELQETGARLARVAAALGLAFEFHAVVDRLEDVRLWMLHVKRGECVAVNCVLAMHRLLRDDAALTDFLGLARSTGATILLLGEHEGGGLNSGRWEARFARALRYYAAAFDAVDAAGLPEASPARAKAEEMFAREIRNAVAFEGPERFERHESFAGWRRRMEDGGGFKNAGIGEREAMQGRMIARMFGPDKYTVQAHGGGGSGGGEALTLRWLDQPLYTVTAWTPAGDGAGGSTVSASTTASHSQQS

SEQ ID NO: 1876 - protein, 213 aa, Glycine max
MAVLPSSSSNLELTISVPGFASSPVLLPLSSVKELDINQVPLEEDWMASNMEDEEEGSNGDPPRKKLRLTKEQSRLLEESFRQNHTLNPKQKESLAMQLKLRPRQVEVWFQNRRARSKLKQTEMECEYLKRWFGSLTEQNRRLQREVEELRAIKVGPPTVISPHSCEPLPASTLSMCPRCERVTSTADKPPSAAATLSAKVPPTQSRQPSAAC

SEQ ID NO: 1877 - protein, 207 aa, Glycine max
  misc_feature (16)..(16): Xaa can be any naturally occurring amino acid
  misc_feature (24)..(24): Xaa can be any naturally occurring amino acid
SQLRRPPPLDSFDNLXCRRCLVFXCRLHGCSQDLVFPAEKQPTWNPPDTENAPCGPNCFRSVLKSERFAKTSSAQADEEKSSGGALSRKKSSAKRRIKCSQSESASSNAKNISESSDSENGPGRDAVSASRSAPPKTKPVGKGGIGKRNSKRVAERVLVCMQKRQKKTMVSDSDSISEALDRSSNDMVTDPHAMSSEDNMRKEFDDN

SEQ ID NO: 1878 - protein, 197 aa, Oryza sativa (japonica cultivar-group)
MENLKATELRLGLPGTEEEAAPPPSTPRAGSKRALAGEPDQAKIKPAAAAKAQVVGWPPVRSYRKSCLQPTTTTTKSKPPPAAAAAETQQKEDVAGAGGLFVKVSMDGAPYLRKIDLKVYKGYRELREALEAMFLCFSGGAAADAAVNPSDFAVTYEDKDGDLMLVGDVPFEMFISTCKRLRIMKGSEARGLGATRG

SEQ ID NO: 1879 - protein, 124 aa, Oryza sativa (japonica cultivar-group)
MGGKCPHRKVKKRRLSHKTARRGKFLVKADDAVYDELVKLADAGKDADATQLPVDEDLPGMGQFYCLHCDRYFASESVKEEHYRSKRHKKRIKQMSGPAPHTQLDAELAAGMGMPDNGLKLMSM

SEQ ID NO: 1880 - protein, 386 aa, Arabidopsis thaliana
MPQNPPNPQNSIQFQHPHPYTTSGDQQTQPPIKSLYPYASKPKQMSPISGGGCDDEDRGSGSGSGCNPEDSAGTDGKRKLSQWHRMKWTDTMVRLLIMAVFYIGDEKKGKWKSVSRAMVEKGFSVSPQQCEDKFNDLNKRYKRVNDILGKGIACRVVENQGLLESMDHLTPKLKDEVKKLLNSKHLFFREMCAYHNSCGHLGGHDQQPPQQNPISIPIPSQQQNCFHAAEAGKMARIAERVEVEEEVESDMAEDSESEMEESEEEETRKKRRISTAVKRLREEAASVVEDVGKSVWEKKEWIRRKMLEIEEKKIGYEWEGVEMEKQRVKWMRYRSKKEREMEKAKLDNQRRRLETERMILMLRRSEIELNELQSSGTRVDPSSAKG

SEQ ID NO: 1881 - protein, 183 aa, Glycine max
MDPSSGQHQQMSSQSLENMLACSKAHQERKPTPQPEQALKCPRCDSTNTKFCYYNNYSLSQPRYFCKSCRRYWTKGGTLRNVPVGGGCRKNKRSSSKRVQDQAFTPNVNPLTGLPSLMSYDSNDLTLALARLQKQSCGQLGYDDHDLSMLGNHHTSTPCGDNILGMHHHSSSSSTNPGFLDAL

SEQ ID NO: 1882 - protein, 218 aa, Antirrhinum majus
MVRGKTQMRRIENATSRQVTFSKRRNGLLKKAFELSVLCDAEVSLIIFAPRGKLYEFASSSMQDTIERYQCHTKELQANNPPAEHNIQHVRHEAASLMKKIEQLETSKRKLLGEGLGTCTFEELQQLEQQLERSVATIRARKTQMFKQQIEQLKEKGKSLAAENAMLHQKIGVEQQQVPALNLQKAVMGSSEISEVSDVETELFIGLRETRAKRPLQQ

SEQ ID NO: 1883 - protein, 447 aa, Capsella rubella
MLTSFKSSSSSSEDATTETPPPPFCQLASSSSSSAATSASHHLRRLLFTAADFVSQSNFTAARNLLSILSLNSSPYGDSTQRLAHLFTKALSLRINRLQQEQDPTVATCTTNEMTMSTNSTVFTSSVCKEQFLFRTKNNNSDFESCYYLWLNQLTPFIRFGHLTANQAILDATETNDNGALHILDLDISQGLQWPPLMQALAERSSSPNSPPPSLRITGCGRDVTGLNRTGDRLTRFANSLGLQFQFHKLVIVDEDLPGLLLQIRLLALSAVQGETIAVNCVHFLYKFFNDDADLIGHFLTVIKSLNPRIVTMAEREANHGDHSFLIRFSEALDHYVAIFDSLEATLPPNSRERLTLEQRWFGKEIMDVVAAEATERKQRHRRFEIWGEMMKRFGFVNVPIGSFALSQAKLLLRLHYPSEGYNLQFLNDSLFLGWQNRLLFSVSSWK

SEQ ID NO: 1884 - protein, 66 aa, Taraxacum officinale
NDGQAKITPRAYDESYAEDEDEHGETLCGSCGGNYSGDEFWIGCDICERWYHGKCVKITPAKAESI

SEQ ID NO: 1885 - protein, 428 aa, Glycine max
YLESTLQSRQLRIPDNFLRKYGTQLSTIATLTVPDGSVWRIGLKKADNRILFVDGWQDFVQHYSIGVGYFLVFMYEGNSSFIVHIFNLSTSEVNYQSAIRNRNEGSCLANYHHIFDEMEDVDSLDLSDLSPQYLTPGSLQNKGCVGSVDQLTPGKSHTPALQNLFNGGSKLNRINWGDGGSAFSSKNANSQGNQSTRDIGVQFNAVEFKRSTEELKLRYSNSNEEAVNKTAKKKRKSEPYGEEPSGENEEEAEMRYRFYESASARKRTVTAEERERAINASKTFEPTNPFCRVVLRPSYLYRGCIMYLPSTFAEKNLNGVSGFIKLQLSNGRQWSVRCLYRGGRAKLSQGWFEFTVENNLGEGDVCVFELLRMKEVVLQVTVFRVTEDAGLLNQLPMQQQQQSPNISHTKLLNPHLQHRISTTKLIRN

SEQ ID NO: 1886 - protein, 238 aa, Triticum monococcum
MGRGKVVLQRIENKISRQVTFAKRRNGLLKKAYELSLLCDAEVALVLFSHAGRLYQFSSSSNMLKTLEKYQRYIFASQDAAVPTTDEMQNNYLEYMELKARVEVLQRSQRNLLGEDLAPLSTIELEQLEGQVGKTLRQIRSRKTQVLLDEMCDLKRKEQILQDANMTLKRKLGEIELEATPDPPQQPQQQQMWQGDRGVPPHTPPQPEHFFQALERYPSLQPVFRGMDVNQPPPAWMA

SEQ ID NO: 1887 - protein, 259 aa, Poa annua
MGRGRVELKRIENKINRQVTFSKRRNGLLKKAYELSVLCDAEVALIIFSSRGKLYEFGSAGTTKTLERYQHCCYNAQDSNSALSETQSWYQEMSKLKAKFEALQRTQRHLLGEDLGPLSVKELQQLEKQLECSLSQARQRKTQLMVEQVEELRRKERQLGEINRQLKHKLDAEGSSSNNYRAMQQLTWAAGTVVDEGAAAYHMQHQQQQQPNHSAAMDCEPTLQIGYPHQFAAPEQAANNIPRSSGQGGENNFMLGWVL

SEQ ID NO: 1888 - protein, 94 aa, Musa x paradisiaca
ACAEAVQQENLKAADALVKHISVLAASQDGPMRKVAGYFAEAIARRIYRRRPLSQVDRALDSPALEDLLNLHFYESCPYLKFAHFTANQAILEA

SEQ ID NO: 1889 - protein, 380 aa, Arabidopsis thaliana
MTFRSLLQEMRSRPHRVVHAAASTANSSDPFSWSELPEELLREILIRVETVDGGDWPSRRNVVACAGVCRSWRILTKEIVAVPEFSSKLTFPISLKQSGPRDSLVQCFIKRNRNTQSYHLYLGLTTSLTDNGKFLLAASKLKRATCTDYIISLRSDDISKRSNAYLGRMRSNFLGTKFTVFDGSQTGAAKMQKSRSSNFIKVSPRVPQGSYPIAHISYELNVLGSRGPRRMRCIMDTIPMSIVESRGVVASTSISSFSSQSSPVFRSHSKPLRSNSASCSDSGNNLGDPPLVLSNKAPRWHEQLRCWCLNFHGRVTVASVKNFQLVAVSDCEAGQTSERIILQFGKVGKDMFTMDYGYPISAFQAFAICLSSFETRIACE

SEQ ID NO: 1890 - protein, 251 aa, Betula pendula
MGRGRVELKRIENKINRQVTFAKRRNGLLKKAHELSVLCDAEVALIIFSNRGKLCEFCSSPSMLKTLERYQKCNFGAPEPNVSAREALELSSQQEYLKLKARYEALQRTQRNLMGEDLGPLSSKELELLERQLNMSLKQIRSIRTQCMLDQLTDLQRKEHMLNEANRTLKQRLVDGYHIDTVLQLDQSANDVGYGRQPAQTQDDCFFHPLCEPTLQIGYQHDHPMTVVTAGSGSVVTAGPSVNNYMSGWMP

SEQ ID NO: 1891 - protein, 244 aa, Brassica napus
  misc_feature (20)..(20): Xaa can be any naturally occurring amino acid
  misc_feature (228)..(228): Xaa can be any naturally occurring amino acid
QSCKQYTPCGCLSMCGKDCXCLTNETCCEKYCGCSKSCKNRFRGCHCAKSQCRSRQCPCFAAGRECDPDVCRNCWVSCGDGSLGEAPRRGEGQCGNMRLLLRQQQRILLGKSDVAGWGAFLKNSVSKNEYLGEYTGELISHREADKRGKIYDRANSSFLFDLNDQFVLDAQRKGDKLKFANHSAKPNCYAKVMFVAGDHRVGIFANERIEASEELFYDYRYGPDQAPXWARKPEGSSKKDDSSI

SEQ ID NO: 1892 - protein, 518 aa, Coccidioides immitis RS
MDSDDEFMSDVTSQLDEDMDFIDTQDSDEDSLGEDFDADLGASFTDEKEVTKKSRKAYEVEFKVLSPDDIQREQTVQINEVSSILGLPPESAAILLRFGRWNRERLIESYMDHPEKILEEAGLGSNITGTPKTEVVDGFMCDICCEDGEDLQTFAMRCGHRFCVDCYRHYLVQKIKEEGEAARIQCPQDQCQQIVDSKSLELLVPDDIKERYHILLTRTYVDDKANLKWCPAPNCEFAVDCSVKTRGLDRIVPTVRCSCAHMFCFGCTLNDHQPAPCAIVKMWLKKCKDDSETANWISANTKECPKCHSTIEKNGGCNHMTCRKCKHEFCWMCMGLWSEHGTSWYNCNRYEEKSGAEARDAQARSRRSLERYLHYYNRYANHEQSAKLDKDLYLKTEKKMVNLQTQSGMSWIEVQFLDTASRTLQECRQTLKWTYAFAFYLARNNLTEMFEDNQKDLELAVESLSEMFEKPVAELAEVKGDILDKTAYCDRRRCTLLSYTAENLKAGEWSFNVDITMA

SEQ ID NO: 1893 - protein, 353 aa, Oryza sativa
THQCLITSIHNQGVSDTSQPHSPTFRRAKISALALLKMVVHARAGGTIEVMGLMQGKCEGDAIVVMDAFALPVEGTETRVNAQADAYEYMVEYSTINKQIGSHHAIDHNVSEVSVFANTLMTDLAGRLENVVGWYHSHPGYGCWLSGIDVSTQMLNQQFQEPFLAVVIDPTRTVSAGKVEIGAFRTYPKDYKPPDEPVSEYQTIPLNKIEDFGVHCKQYYALDITYFKSSLDSHLLDLLWNKYWVNTLSSSPLLGNRDYVAGQIFDLADKLEQAEGQLAHSRYGMLMPSQRKKEQEESPLAKVTRDSSKITAEQVHGLMSQVIKDILFNSVHPSNKASTSAPDSSGPEPMVEA

SEQ ID NO: 1894 - protein, 119 aa, Brassica napus
LVRERSRGGRTLRAQKNVMNCPCCPTDISDFLQNPQVNREVMEVIEKLKNKEEDKAESEEVEDASVEEKAESESEENCETTDPEEETPVVTEEAEQPRKRAKLDIDTVVPATMLESDMK

SEQ ID NO: 1895 - protein, 269 aa, Pimpinella brachycarpa
MGRQPCCDKLGVKKGPWTADEDNKLINFILTNGQCCWRAVPKLAGLRRCGKSCRLRWTNYLRPDLKRGLLTDAEEQLVIDLHARLGNRWSKIAGRLPGRTDNEIKNHWNTHIKKKLIKMGIDPVTHEPLHKEETNSQKEILLQPFQSPAETENHVPPIPHTNDMASSENSCTPTDQNSSGDESNSLSAICDQIDDSLISYLFEDDTPGLVDAPWENFNKVDMVLPSWDESFPWLLDCQDFGIQDFGFDCFNDIEMNMLTQLDVKNDQTG

SEQ ID NO: 1896 - protein, 294 aa, Oryza sativa (japonica cultivar-group)
HVEHHVCCVAEDNMRSYMDGGGAAAYEEEEEEVEDDDGGGGGGGGGGGGGLGEKKRRLAAEQVRALERSFEADNKLDPERKARIARDLRLHPRQVAVWFQNRRARWKTKQIERDFAALRSRHDALRLECDALRRDKDALAAEIADLRDRVDGQMSVKLEAVAADEHQPPPPPPPPPLAYNSKVVDGSTDSDSSAVFNEEASPYSGAAIDHHHHQTPASYDTAGFTSFFAPSTTLTSSLSFPSMFHASSHFDGHQELLVGGGGAGAVADADLGGAGFFAGDEHAGGLSWYGAEGW

SEQ ID NO: 1897 - protein, 326 aa, Oryza sativa (japonica cultivar-group)
MITMDLMGGYGRVDEQVAIQEAAAAGLRGMEHLILQLSQTGTSERSPAPAQEQQQQVDCREITDMTVSKFKKVISMLNRTGHARFRRGPVVAQSSGPAASEPAPVRSSPSAVSRPMTLDFTKAASGYGKDAGFSVSGISAASSSFLSSVTGDGSVSNGRGGGSSSLMLPPPPATSCGKPPLSSAAAAMSAGAGHKRKCHDHAHSENVAGGKYGSTGGRCHCSKRRKHRVKRTIRVPAISSKVADIPADDFSWRKYGQKPIKGSPFPRGYYKCSTLRGCPARKHVERDPTDPSMLIVTYEGEHRHSPSAAGQDHPPAPPPPLALPLA

SEQ ID NO: 1898 - protein, 240 aa, Triticum aestivum
  misc_feature (28)..(28): Xaa can be any naturally occurring amino acid
  misc_feature (46)..(46): Xaa can be any naturally occurring amino acid
  misc_feature (118)..(118): Xaa can be any naturally occurring amino acid
LAARQVKKQPGLCCRPVLPGWAKRSGSXALRSGGENPAFWCPQLSXGGKPRVRVPPNGWGAEARVLTDFQVILFGKSFRSGREFCGTRAKHWLLHPFPPFDGVAAPIVAFSAFAAILXPAEPATSSTAASSDGGTDRFHRWSICQKEFPTGQALGGHKRKHYDGGVGAAASSTELLAAAAAESEVGRTDNGSSAARPLDLYIPTVPEFVWRPCAKGKMMWEVDEEVQSPLAFKKPRLLTA

SEQ ID NO: 1899 - protein, 319 aa, Oryza sativa (japonica cultivar-group)
MEPATETTATSPAAAAAAQPEAEAEAEAESAATPVAVAAAAAATYQPPAPVVPVAVAGAAAGRGNGKRKRGRPRKYGPDGSLLRPLKATPISASVPDDSGGGQYTPAAAVGAVMKRGRGRPVGFVSRASPVSVAVTAATSTAAVVVSSPATHTQTPLGPLGELVACASGANFTPHIINVAAGEDVNMKVISFSQQGPRAICILSANGVISNVTLRQQDTLGGTVTYEGRFELLSLSGSFTPTDSGGTRSRSGGMSVSLAATDGRVIGGGVAGLLVAASPVQVVVGSFLPSYQLDQNATKKPVIEITTVLGSGSTPTCDA

SEQ ID NO: 1900 - protein, 616 aa, Oryza sativa (japonica cultivar-group)
MAVKASSADNRTRSTVSLCIVIGMCCFFYILGAWQKSGFGKGDSIALEITKRTDCTILPNLSFDTHLAKQARPRDLVSPAKKFKPCPDRYTDYTPCQDQNRAMKFPRENMNYRERHCPPQKEKLHCLIPPPKGYVAPFPWPKSRDYVPFANCPYKSLTVEKAIQNWVQFEGNVFRFPGGGTQFPQGADKYIDQLASVVPIANGTVRTALDTGCGVASWGAYLLKRNVLAMSFAPRDSHEAQVQFALERGVPAVIGVLGTIKLPYPSRAFDMAHCSRCLIPWGANGGIYMMEVDRVLRPGGYWVLSGPPINWKVNYKGWQRTKKDLEAEQNKIEEIADLLCWEKVKEIGEMAIWRKRLNTESCPSRQDESSVQMCDSTNADDVWYKKMKPCVTPIPDVNDPSEVAGGAIKPFPSRLNAVPPRIANGLIPGVSSQAYQKDIKMWKKHVKAYSSVNKYLLTGRYRNIMDMNAGFGGFAAAIESPKSWVMNAVPTISKMSTLGAIYERGLIGIYHDWCEAFSTYPRTYDLIHASGLFTLYKNKCNMEDILLEMDRVLRPEGAVIMRDDVDILTKVNRLALGMKWNTRLVDHEDGPMVREKVLYAVKQYWVGGNQTAAAAA

SEQ ID NO: 1901 - protein, 240 aa, Medicago sativa
RGKIQIKRIENTTNRQVIFSKRRNGLLKKAKELAILCDAEVGVMIFSSTAKLYDFASTSLRSVIGRYNKSKEEHNQLGSTASEIKFGQREAAVLRQQLHNLQESHRQIMGEELSGLTVKELQGLENQLEISLRGVRMKKEQLFMDEIQELNRKGDIIHQENVELYRKVYGTKDKNGTNRVLSLTNGVGIGDDSNRTCESPAQPATETRTTTALMHSLEISVLTCKQGKWTQILISYMNGI

SEQ ID NO: 1902 - protein, 275 aa, Zea mays
MKRPRGAGATPSLSAMPNHQEDDGYGVVGMEADVDVDVDEEMMAFGGGGGGEKKRRLSAEQVRALERSFEVENKLEPERKARLARDLGLQPRQVAVWFQNRRARWKTKQLERDYAALRRSYDALRLDHDALRRDKDALLAEIRELKAKLGDDEDAAASFTSVKAEPAASDGPAPAGVGSSEISDSSAVLNDADPPVAEAPAPAPEVQGTLLVAPAGPVAGAAAANHGGVFFHGSFLKVEEDETGLLDDDGPCGGFFAVEQPPAMAWWNEPAEHWN

SEQ ID NO: 1903 - protein, 359 aa, Pisum sativum
MSLEMKDRQRWRAEEDALLRAYVKQYGPREWNLVSQRMNTPLNRDAKSCLERWKNYLKPGIKKGSLTEEEQHLVISLQATHGNKWKKIAAQVPGRTAKRLGKWWEVFKEKQQRETKGINKTVDPINDSKYEHILESFAEKLVKERPSPSFVMAASNSSYLHTDAQAATPGLLPSWLSNSNNTAPVRPNSPSVTLSLSPSTVAAPPPWMQPVRGPDNAPLVLGNVAPHGAVLSYGENMVMSELIDCCKELEEGHHALAAHKKEAAWRLSRVELQLESEKASRRREKMEEIEAKIKALREEQAVALDRIEGEYREQLAGLRRDAEAKEQKLAEQWAAKHLRLTKFLEQVGCRSRHAEQNGR

SEQ ID NO: 1904 - protein, 248 aa, Arabidopsis thaliana
MEEGGSSHDAESSKKLGRGKIEIKRIENTTNRQVTFCKRRNGLLKKAYELSVLCDAEVALVIFSTRGRLYEYANNSVRGTIERYKKACSDAVNPPSVTEANTQYYQQEASKLRRQIRDIQNSNRHIVGESLGSLNFKELKNLEGRLEKGISRVRSKKNELLVAEIEYMQKREMELQHNNMYLRAKIAEGARLNPDQQESSVIQGTTVYESGVSSHDQSQHYNRNYIPVNLLEPNQQFSGQDQPPLQLV

SEQ ID NO: 1905 - protein, 473 aa, Zea mays
  misc_feature (348)..(348): Xaa can be any naturally occurring amino acid
MAGKEAAESSRARRRMDLNLYVGLPPLSPPRLWLDTSAPSRTTWVSHSGPGAALDAPRTREPEEPLAPAAAAAAAYSPSNALFAPDPEEHPVFDPLVYSWLDGSGEEYTDAPALSAPAPTPVDGHGVSGPQFLMAATGLDGDDLAVPRPVHPSRVAAAAAAAGGLEMVGTSVLGQSTPGATASEAGELRFLRAIRISQQHNIVRSGPASHTQVAASTDAGSLVMAMQHTQSAFEAAADPDGGGDKVRGSDAAEKDGSCDCNCDSSFECNICLERAKQPVVTSCGHLFCWPCLYRWLHAQSPFCDCPVCKGEVLLTSITPIYGRGGDEEGDSGSSAVPDLPPRPQANRXDSLRQQLQTATDARGIAAVLREMIQNQGIVTSVPAGRQRAGSARRQRRQGSNASRSAVVNAGNAAPEGSDPIQPPHSNGGNGEQVVHAAPQQPPPAVVLGEPGPSRRSRHSESAAIRRTRRRPQQ

SEQ ID NO: 1906 - protein, 325 aa, Triticum aestivum
  misc_feature (127)..(128): Xaa can be any naturally occurring amino acid
  misc_feature (199)..(199): Xaa can be any naturally occurring amino acid
  misc_feature (231)..(231): Xaa can be any naturally occurring amino acid
  misc_feature (271)..(271): Xaa can be any naturally occurring amino acid
MATTGWGNSRYARRGGDSARGSGAYSLRKPQRERHHQGEEMDHSLSFPSYLQRRVQEVAAQENPVKESASPGSGSGSPGGAAEKMGRGRIEIKRIENTTNRQVTFCKRRNGLLKKAYELSVLCDAEXXLIVFSGRGRLYEYSNNSVKATIERYKKATSDTSSAGTVAEINAQHYQQESAKLKQQITTLQNSNRFIFSPXTLIGDTMATMSHRDLKQLEGRLDKGLGKIRAXRKNELLCAEIEYMQRREMELQNNNFFLREKVAETERGQQXQTLNMMGAASTSNEYEQNMIHCDPRTFLQFNFMQQQPQYYSQQEDRKSFNSVGR

SEQ ID NO: 1907 - protein, 202 aa, Glycine max
MGDFIFSFKTQPQDHAHHQRAKHNNNNNKRLTEDQVAILEKCFASNMKLEPEQKFHLANQLGVPPRQVAIWYQNKRARWKTQSLEVDHGVLQARLENVVAEKKQLEKDVERLKAELKKAQEMLLISNNVKSGDHSNNNNNNASCEFSTSFEEGGSSGVVLDDATHHHHHECWQSGGEVMQVEELYAYFVGANYGTGLHEKRA

SEQ ID NO: 1908 - protein, 94 aa, Glycine max
  misc_feature (20)..(20): Xaa can be any naturally occurring amino acid
  misc_feature (29)..(29): Xaa can be any naturally occurring amino acid
  misc_feature (41)..(41): Xaa can be any naturally occurring amino acid
  misc_feature (43)..(43): Xaa can be any naturally occurring amino acid
ENLTEENRRLQKEVQELRAXKLSPQFYMXNAPHPRTATPCXPXWRAVWAVPVPTGRTHGWPRHSPWAPEPQGPRPKIGQWAPWFRPHLRPAGFE

SEQ ID NO: 1909 - protein, 225 aa, Cucumis sativus
MGRGKIEIKRIENTTNRQVTFCKRRNGLLKKAYELSVLCDAEVALIVFSSRGRLYEYSNNSIKTTIERYKKACSDSSATSSVTELNTQYYQQESAKLRQQIQMLQNSNRHLMGDSLSALTVKELKQLENRLERGITRIRSKKHEMLLAEIEYLQKREIELENENVCIRTKIAEVERVQQANMVSGQELNAIQALANSRNFFSPNIMEPAGPVSYSHQDKKMLHLG

SEQ ID NO: 1910 - protein, 356 aa, Capsicum annuum
MSSNSSLSVVESKLPPGFRFHPRDEELICDYLMKKIDQSPDQQQQYPFLIEVDLNKSEPWEIPEVACVGGKEWYFYSQRDRKYATGLRTNRATVSGYWKATGKDRAVVRKGSLVGMRKTLVFYQGRAPKGRKSDWVMHEFRLEGPLNNNIRPQISSPREDWVLCRVFHKNKELLAAKQGTSSNNIYYDDGTISSSSVPQLMENPYITFDQTQPNNNNINMNELYYEQVPCFSIFTPNQTTFTSHSHHHHHPATSTTTGATPITTAYGGFPADIGNYLNATATSSTCDNKVIKAVLSHLSTKNIIMEGNNNNSNFNNSSAQNIMNIKGGNSPSFGEVSSETSFLSEVAYHPTMWNNY

SEQ ID NO: 1911 - protein, 261 aa, Arabidopsis thaliana
MSVDSEETSSNGVVPPNSLPPKPEARFGRHVRSFSVDSDFFDDLGVTEEKFIATSSGEKKKGNHHHSRSNSMDGEMSSASFNIESILASVSGKDSGKKNMGMGGDRLAELALLDPKRAKRILANRQSAARSKERKIRYTGELERKVQTLQNEATTLSAQVTMLQRGTSELNTENKHLKMRLQALEQQAELRDALNEALRDELNRLKVVAGEIPQGNGNSYNRAQFSSQQSAMNQFGNKTNQQMSTNGQPSLPSYMDFTKRG

SEQ ID NO: 1912 - protein, 197 aa, Zea mays
  misc_feature (50)..(50): Xaa can be any naturally occurring amino acid
MEISSSVDCGQEKEQPTNKRPRSESTTESSTKASREKIRRDKLNERYVPXFLELGAILEPGKTPKMDKTAILSDAIRVVGELRSEAKKLKDSNENLQEKIKELKAEKNELRDEKQRLKAEKESLEQQIKFLNARPSLVPHHPVIPASAFPAPQGPAAAARHKLMMPVIGYPGFPMWQFMPPSDVDTSDDPRSCPPVA

SEQ ID NO: 1913 - protein, 300 aa, Brassica napus
MAEELGCVDFLGEDDLFLDFDLSLFTETPIAGDFIRSSPDSANSWIGDIESQLMNDEDNQNFLELDQQSVSEFLADIFVDDPTSDSADLVTGKVDDVPTEGFVNGKGPEESDDAGKEKAVEKKWNGSENLDEAKVESEISGDDDAMAKKRRRRVRNRDAAVRSRERKKEYVTDLEKKSKYLERECMRLGRMLDCFVAENHSLRLCLQKGGGNASMMTRQESAVLLLESLLLGSLLWYLGDIICPFLPLPQPKTCFLPAEADGPEKLVLSGRESSKLSNNYACKSRRCKGSRPRMKHQVCI

SEQ ID NO: 1914 - protein, 750 aa, Oryza sativa (japonica cultivar-group)
MASSSNPSNLPCSSDGVCMLCKVLTTEVEQLRCSTCATPWHTPCLSSIPPLTDVAHWVCPDCSGDVTASYPPSDVVRPESSLIAAIRVIEADPVLSIQEKARRRQELLGHAGDAGAAITEAVGENVEDSESNNPLSMLNKNINCSFCMLLPERPVTTPCGHNFCLKCFRRWIENGKRACVICRAPITQKVAQDLRINLALVQAIRMAKAANNASTTGETTVYHYKENEDKPDRAFTTERAKRAGMANASSGQIFVTIAPDYFGPILEDHDPRRNRGVRVGDHWKDRMEGRQWGAHFPHIAGIAGQSTHGAQSVALSGGYLDDEDHGEWFLYTGSGGRDLSGNKRTSKEQSFDQKFEKLNAALRVSCLNGYPVRVVRSFKEKRSPYAPESGVRYDGIYRIEKCWRKTGVQGTFKVCSDEHGDHPRPLPDIEELKNAIDITERKGNPAWDFDATDGWKWMITPPISRKAVVTGDPRGKKMQGAARHTNNLSMRERLLKEFRCSICRNVMEEPVTTPCAHNFCKKCLLGSYDNLSLTEERSRGGRTLRARKIVKKCPSCPSDIADFVQNPQVNRDIMNVIESLQKEAEKEDHARVSGEGSSAALVDSDDENDTAWENQDDGNLDEGGCNNPEDMITESVDLNSVTNVDNTENKVEVQQPHKRTAGAGKGKGGKWARTSSAPGDADARNVVTSTETLDGIAAENVADLVQIEDCTFTGVERADPNALEVDGKNMIPDFSEAEKVNPKQDQEVLP

SEQ ID NO: 1915 - protein, 238 aa, Stylosanthes hamata
MAPREKTPAVKVNGKSNAGVKEVHFRGVRKRPWGRYAAEIRDPGKKSRVWLGTFDTAEDAARAYDAAAREFRGPKAKTNFPFPDSDDINNNNIVVVKNNNRSPSQSSTVESSSRDRDSYSAAAATAVADSSPLDLNLAPQELDSPDPFGSHSTQPFAVFPGGMPAAKQALYLDAVLRASMASHGQFGFGYNRPAAAGAQSDSDSSSVIDLNQNEGDVAKNNGRGLVLDLNEPPPQEMA

SEQ ID NO: 1916 - protein, 319 aa, Oryza sativa (indica cultivar-group)
MARSMLRNHPEASVLDTIRQHLLEEPRGGGGGGGEAAEASFGSLVADMWSDSLPFRDDDADDMVVFGAMRDAFSCGWLPDGVFAEVKPEPLLSPDSSSYDGSSCCFGFADVSEPVTPSDAASGAAEAAAAAAAATAEHGKEEEAAAAVARGKHYRGVRQRPWGKFAAEIRDPAKNGARVWLGTFDTAEDAALAYDRAAYRMRGSRALLNFPLRIGSEIAAAAAAAAAAAAGDKRPSPEPATSESSFSSSSSCTTTTTSSSTSSSGSPKRRKRGEAAAASMSMPLVPPPSQLNWPVQAWYPAAAPVEQVAITPRVEQLVI

SEQ ID NO: 1917 - protein, 318 aa, Oryza sativa (indica cultivar-group)
MDFPGDAEDFALEFIREHLLGGDAPVLPPAAVPAAAAYPPTSTMFLPQQQRGYAGLTPQEYVVDSAPAADQAAFRDDQPDPAADVMIMFGGERFPAVKPSSSSSPSLTVTVPPSSFGSWAPAAVPAAAATAAAVEDFRKYRGVRQRPWGKFAAEIRDPKRRGSRVWLGTYDTPVEAARAYDRAAFRMRGAKAILNFPNEVGTRGAELWATPPPTNKRKRQPEDDTAAADDVEVIGVANKAVKTEAPTSAYSSSSLSSMSRDTTATTSSAGTSTGSSEPTSFPVVTPSSWSWDQYWDGLPPLSPLSPHPALGFPQLTVS

SEQ ID NO: 1918 - protein, 328 aa, Oryza sativa (indica cultivar-group)
MDFHHGDADDFALEFIREHLLGVDGATATATEPADLEVVEPAAAYPPMSWQEQRQQEQHGCHVELTDEHLESAPAAEAAAAFRTAPAQPAAEVMIKFGGEPSPVRPSSSLTISLPPSSFGSWASAAAPAAAAVEDFRKYRGVRQRPWGKFAAEIRDPKRRGSRVWLGTYDTPVEAARAYDRAAFRMRGAKAILNFPNEVGTRGTELWAPPPPPPAHSAAASTTNKRKRQPSEDPDDGVEVIGVVSKAVKTEAPTSNSSSLSSSLTSRDTTPATSSAGAEHAGAAAESSPATPSSWSWEQYWEALLGGLPPLSPLSPHPALGFPQLTVN

SEQ ID NO: 1919 - protein, 759 aa, Zea mays
MPDLPCDGDGVCMVCRVTSPPEVDLLHCSTCATPWHSPCLSKAPALADAASWSCPDCSLDSATVAAPSAPANTLVAAIRAIESDNTLSDQEKARRRQALLAGDAPDVADDDDAADDTLEIVGKNFSCVFCMKLPERPVTTPCGHNFCLKCFQKWIQSKKRTCGKCRAPIPAKMAEQPRINSALVEVIRMAKISKNHNSAGSAVPYHYMRNDDRPDKAFTTDRAKKAGKANASSGQIFVTIAPDHFGPILAENDPRRNMGVRVGETWEDRLECRQWGAHFPHVAGIAGQSTHGAQSVALSGGYEDDEDHGEWFLYTGSGGRDLSGNKRTNKEHSSDQKFEKLNAALRISCLKGYPVRVVRSHKEKRSSYAPESGVRYDGVYRIEKCWRKIGIQGKFKVCRYLFVRCDNEPAPWTSDDHGDRPRPLPKIKELQGATDITERKGRPSWDYDEKDGWKWMVPPPVSKRPVLSGDPETDKLIRKATKRAHLSVAERLLKEFGCSICRAVIKEPLTTPCAHNFCKTCLLGAYDSQSSMRERSRGGRTLRAQKIVKTCPSCPTDICDFLENPQINREMMELIESLQRKAVEEGKMAAGDAEESGDGDSEENGGALVKGEDDSNLNEEGQDGVDADGSVKIVVEMEGAKDDKKSKMGAAEVVDVLVEDAAAKQPKKRTADEDAAAKQTKHKADAETGGKRVKSSAAVEEVDVCVTPMKRTRKSGDMHDDGNGSPAVSSGRRVTRSSVNATGADDSPARRTRSRGRAC

SEQ ID NO: 1920 - protein, 301 aa, Oryza sativa (indica cultivar-group)
MSGMNSLSMVEARLPPGFRFHPRDDELVLDYLERKLLDGGVGGAAAAVTIYGCPVMVDVDLNKCEPWDLPEIACVGGKEWYFYSLRDRKYATGQRTNRATESGYWKATGKDRPISRKGLLVGMRKTLVFYKGRAPKGKKTEWVMHEFRKEGQGDPMKLPLKEDWVLCRVFYKSRTTIAKLPTEGSYNNIDSVATTSLPPLTDNYIAFDQPGSMQNLEGYEQVPCFSNNPSQQPSSSMNVPLTSAMVDQEQNNMGRAIKDVLSQFTKFEGNVKREALQSNFSQDGFDYLAESGFTQMWNSLS

SEQ ID NO: 1921 - protein, 363 aa, Nicotiana tabacum
MRERQRWRSEEDALLRAYVKQYGPKEWHLVSQRMNTALNRDAKSCLERWKNYLKPGIKKGSLTQEEQRLVIHLQAKHGNKWKKIAAEVPGRTAKRLGKWWEVFKEKQHREQKENNKVVDPVDEGKYDHILETFAEKIVKERSVPGLLMATSNGGFLHADAPAPSPQTLLPPWLSNSTATSTVRSPSPSVTLSLSPSTVPPTPTPTPGIPWLQTDRGPENAPLILSSFPHHGVAPPCGENPFVTELVECCKELDEGHRAWAAHKKEAAWRLRRVELQLESEKICKVREKMEEIEAKMKALREEQKATLDRIEAEYKEQLAGLRRDAEAKEQKLAEQWASKHLRLSKFLEQMGCQSRLAEPNGGR

SEQ ID NO: 1922 - protein, 224 aa, Oryza sativa
MARGKVQLRRIENPVHRQVTFCKRRAGLLKKARELSILCEADIGIIIFSAHGKLYDLATTGTMEELIERYKSASGEQANACGDQRMDPKQEAMVLKQEINLLQKGLRYIYGNRANEHMTVEELNALERYLEIWMYNIRSAKMQIMIQEIQALKSKEGMLKAANEILQEKIVEQNGLIDVGMMVADQQNGHFSTVPLLEEITNPLTILSGYSTCRGSENGLFLLT

SEQ ID NO: 1923 - protein, 249 aa, Oryza sativa
MGRGPVQLRRIENKINRQVTFSKRRNGLLKKAHEISVLCDADVALIVFSTKGKLYEFSSHSSMEGILERYQRYSFDERAVLEPNTEDQENWGDEYGILKSKLDALQKSQRQLLGEQLDTLTTKELQQLEHQLEYSLKHIRSKKNQLLFESISELQKKEKSLKNQNNVLQKLMETEKEKNNAIINTNREEQNGATPSTSSPTPVTAPDPIPTTNNSQSQPRGSGESEAQPSPAQAGNSKLPPWMLRTSHT

SEQ ID NO: 1924 - protein, 472 aa, Oryza sativa (indica cultivar-group)
MQFTHTAPPPPPLHPNGHGLGLGLYLDVGATRGGGGARPWSSSSSTTTLGGSGYFPSSAAASKISLGNLNSTGCMEQLLVHCANAIEANDATLTQQILWVLNNIAPADGDSNQRLTAAFLCALVSRASRTGACKAVTAAVADAVESAALHVHRFTAVELASFIDLTPWHRFGYTAANAAIVEAVEGFPVVHIVDLSTTHCMQIPTLIDMLAGRAEGPPILRLTVADVAPSAPPPALDMPYEELGAKLVNFARSRNMSMDFRVVPTSPADALTSLVDQLRVQQLVSDGGEALVVNCHMLLHTVPDETAGSVSLTTAQPPVSLRTMLLKSLRALDPTLVVVVDEDADFTAGDVVGRLRAAFNFLWIPYDAVDTFLLKGSEQRRWYEAEVGWKVENVLAQEGVERVERQEDRARWGQRMRAAGFRAAAFGEEAAGEVKAMLNDHAAGWGMKREDDDLVLTWKGHNVVFASAWAPS

SEQ ID NO: 1925 - protein, 217 aa, Crocus sativus
MGRGRIEIRKIENATNRQVTYSKRRLGIMKKAKELTVLCDAEVSIIMLSSTGKFAEYCSPTTDLKKVVDRYQQVSGIDVWKDQYERMQTTLRHLEGINHKLRREIRQKMGEDLDGLGIKELRGLEQSLDESLRLVRQRKYHVIATQTETYKKKLKSTHEAHRSLVHELEMKGEHPDYGFSMEDTFAMANGGPHMFAFGGHPNRHDILGHDSHDLSLA

SEQ ID NO: 1926 - protein, 48 aa, Betula pendula
AVKNSPYPRSYYRCTTAGCVVKKRVERSCDDPSIVVTTYEGQHSNIRA

SEQ ID NO: 1927 - protein, 338 aa, Oryza sativa (indica cultivar-group)
METDEPATKAAGGEPKPSPATKAAGEQEEDDEEESSGGGGTEPEVSTTPAVVVSSSSHMFTREEKETVGERGILNRVFLWTNFELVKEHAAVFVASGDSGPSFFRRKDTGFRVFRETVAHPSSVEKAPVSEYSLFRRDVMEQGGGAADGGDLISLCLMALAAAARGESTALALALAPPPPKLHFRCSLCGRAFASYQALGGHKASHRKPSAAAAAPPAHRDVVVAAAPASSGGVAADADAASEADGRRRRHVCSLCRRGFATGQALGGHKRFHYLHGPSVSATVSSAATAASVGAAFDLNVAPIKEIAGEQRRCGEEADDDDEAESPSPAKKPRRRPG

SEQ ID NO: 1928 - protein, 217 aa, Crocus sativus
MGRGRIEIRKIENATNRQVTYSKRRLGIMKKAKELTVLCDAEVSIIMLSSTGKFAEYCSPTTDLKKVVDRYQQVSGIDLWKDQYERMQTTLRHLEGINHKLRREIRQKMGEDLDGLGIKELRGLEQSLDESLRLVRQRKYHVIATQTETYKKKLKSTHEAHRSLVHELEMKGEHPDYGFSMEDTFAMANGGPHMFAFGGHPNRHDILGHDSHDLSLA

SEQ ID NO: 1929 - protein, 89 aa, Glycine max
  misc_feature (37)..(37): Xaa can be any naturally occurring amino acid
FEEIMDEFIRQQLQMKAQWMEAFEARENERRLKEMEXRQTMEASENERLMMDQRWREREEQRRIREEVRADKRDALITALLNKLRREEM

SEQ ID NO: 1930 - protein, 239 aa, Stylosanthes hamata
MAPREKTPAVKVNAGVKEVHFRGVRKRPWGRYAAEIRDPGKKSRVWLGTFDTAEDAARAYDAAAREFRGPKAKTNFPFPDSDDINSNNNNIVVVKNNNRSPSQSSTVESSSRDRDSYSAAAAATAVADSSPLDLNLAPAGAGFAGSIRFPFQQPFAVFPGGMPAAKQALYLDAVLRASMASHGQFGFGYNRPAAAAAGAQSDSDSSSVIDLNQNEGDVAKNNGRGLVLDLNEPPPQEMA

SEQ ID NO: 1931 - protein, 601 aa, Oryza sativa (japonica cultivar-group)
MCSGPRKPSTPPLPQQQKEATVMAASLLLELAAADDVAAVRRVVEEEKVSLGVAGLWYGPSASGVARLGMERRTAAMVAALYGSTGVLGYVVAAAPAEAARASETDGATPLHMAAAGGAANAVAATRLLLAAGASVDALSASGLRAGDLLPRATAAEKAIRLLLKSPAVSPSSSPKKSASPPSPPPPQEAKKEYPPDLTLPDLKSGLFSTDEFRMYSFKVKPCSRAYSHDWTECPFVHPGENARRRDPRRYSYSCVPCPEFRKGGSCRKGDACEYAHGVFECWLHPAQYRTRLCKDEVGCARRICFFAHKPDELRAVNPSAVSVGMQPTVSSPRSSPPNGLDMAAAAAAMMSPAWPSSPASRLKTALGARELDFDLEMLALDQYQQKLFDKVSGAPSPRASWGAAANGLATASPARAVPDYTDLLGSVDPAMLSQLHALSLKQAGDMPAYSSMADTTQMHMPTSPMVGGANTAFGLDHSMAKAIMSSRASAFAKRSQSFIDRGGRAPAARSLMSPATTGAPSILSDWGSPDGKLDWGVQGDELHKLRKSASFAFRGQSAMPVATHAAAAEPDVSWVNSLVKDGHAAGDIFAQWPEQEQMVA

SEQ ID NO: 1932 - protein, 318 aa, Brassica napus
  misc_feature (295)..(295): Xaa can be any naturally occurring amino acid
  misc_feature (302)..(302): Xaa can be any naturally occurring amino acid
VASWGGDLLDRGILTVSLAPRDNHEAQVQFALERGIPAILGIISTQRLPFPSNSFDMAHCSRCLIPWTEFGGVYLLEIHRILRPGGFWVLSGPPVNYENRWKGWDTTVEEQRSNYEKLQDLLSSMCFKLYAKKDDIAVWQKSPDNMCYNKLSNDPDAYPPKCDDSLEPDSAWYTPLRPCVVVPSPKLKKTDLESTPKWPERLHSTPERISDVPGGNGGLFKRDNSKWKTRAKHYKKLLPAVGSDKPRNVMDMNTAYGGLAAALVDDPLWVMNVVSSYAANTLPVVFDRGLIGTYXDWCEAFXTYPRTYDLLHVDGCYI

SEQ ID NO: 1933 - protein, 270 aa, Magnaporthe grisea 70-15
MAMNPHDATQAQAQGQAQDGRPQANYDLSKGGHYGASSQLAQQGYAPSEHYTGPWANVHQGLKGPYKNILTTYWQHTIDHLENDTHDYKLHQLPLARIKKVMKADPEVKMISAEAPILFAKGCDIFITELTMRAWIHAEENKRRTLQRSDIASALSMSDMFDFLIDIVPREEAAGHAKRAAGQAGAANAAAGQPQMGGMPAQNHTQHMGAEYGLPGHPMGGEADYRQAQNMYPGQVPTGAPNAYGQPQQPMYEVDPNMYSSYTMQPPQSA

SEQ ID NO: 1934 - protein, 202 aa, Corylopsis pauciflora
NGIFKKAQELAVLCDAKVSLIMISNTNKFHEYTSPTITTKKIYDLYQKALGIDLWSSHYERMQENMKTLKDINNKLRRDIRQRMGEDLDNLSYDELHHLEQKMDAAVTIIRERKYHKIETQTGTYTKKVRSSEEMNRNLLLDFEAKCEDPQYGLVENEGDYDSAIAFANGASNLYAFRLHTGHPNLHHGGCGGFGSHDLRLA

SEQ ID NO: 1935 - protein, 400 aa, Oryza sativa
IVLTEKDINERQEEDIGKVSAVLSIRREEACVLLHHYKWNISKLSDEWFADEEKVRDIVGLLLNGIDLPNSRKLTCGICFEGYSSDAMSSAGCAHFYCHECWEGYISAAISDGPGCLSLRCPDPSCGAMVLQNMINKLAKDDDKVRYARFILRAYVEDSKKCTEEAHRPVNCETVSRWILKNSAESENMNWILANSKPCPKCKRPIEKNQGCMHMTCTPPCKFEFCWLCLGSWAEHGERTGGFYACNRYESAKKEGVYDETEARRERAKNSLERYMHYYERWASNQTSRQKAQADLQKAEKEQLAKLTDVFGIPETQLKFIIEAWSQIIECRRVLKWTYAYGYYLDDKVKSEFFEYLQGEAESGLERLHQCAEKDLQSFLTVRSDNTEPAPSIAEFGDFR

SEQ ID NO: 1936 - protein, 382 aa, Oryza sativa (indica cultivar-group)
MASCISCLPRPLTSLSLSLCSPPLTSVLQRTNRHSAQFISTITARFSKQGRPLPPTNKREDLAFSEEGSLPAVTMEQKDEAEMEEVDDEEEEEVDEDMAGGHAAQSPSPSCGLGEKKRRLALEQVRALERSFDTDNKLDPDRKARIARDLGLQPRQVAVWFQNRRARWKTKQLERDFAALRAQHNDALRADCDALRRDKDALAAEVRAHRCVLPDARESLSLTFNSCSTDQIRELREKLPTKPADTAASVKVEAGNDAAAGAAAATVCKDGSSDDSDSSVVFNDEASPYSGAAFIGFGPSFLVDDASAATVGCSSSLPALESKWHGPYSDDSCKGGVYGFTEEWLAACSGEMAGNDAAGFFSDEHASNLNFGWCASGNEGWE

SEQ ID NO: 1937 - protein, 211 aa, Kalanchoe blossfeldiana
NGLFKKAEELTVLCDAKVSIIMISSTQKIHEYISPGITTKQVVDLYQKASNTDVWSKQYERMQETLRKVKEKNKRLHTEIRERMGECLNDLSLEELRGLEQDMDNAVTAIRARKYKVIGSRTDTLRKKVRNVEEIYRKLNQELLSPKPNFEFARVAREEDRLYGLVDNSGDCESVIALGPRVFALHLNPNQSANMQSCGGSDLTYTLMSGN

SEQ ID NO: 1938 - protein, 513 aa, Oryza sativa
MTTRRTRKERKQMGGGGKCKRGKRGKIAAKRRRGQVRCCSSSSSSGGARRRARERESEESLGEMGECRGGGGGGDGLIKLFGKTIPVQPDAKFLILGSASLGEFSDVQQHSGSSSSSTESDVQETAAVAVADPSPRSEVVDGESPPQPGGEAASHQQQQKEMKLKKPDKILPCPRCSSMDTKFCYFNNYNVNQPRHFCKHCQRYWTAGGAMRNVPVGAGRRKNKNATAAAHFLHRVRACAAAAAMPAAPHDATNATVLSFGGGGGGHDAPPVTLDLADKMTRLGKEGLVAHARNADAAAACSEVSSNRDDEQIGNTVAKPANGLQQHPPPPHHHHHSAMNGGGIWPYYTSGIAIPIYPAAPAYWGCMIPPPGAWSLPWPATVQSQAISSSSPPTSATPSVSSFTLGKHPREGGDHEARDHHGNGKVWVPKTIRIDNADEVARSSIRSLFAFRGGDKADDNNDDDGTGVHKLATTVFEPKRDSKTAKHPAITSLPLLHTNPVALTRSATFQEGS

SEQ ID NO: 1939 - protein, 84 aa, Brassica napus
  misc_feature (21)..(21): Xaa can be any naturally occurring amino acid
EKAPYEEVAKKNKETYLQAMXEYLRTKDEEAMSQKKEEEELLKLHRQEALQLLKKKENIPANPRSPLGVSNNFSGVKSPQASNA

SEQ ID NO: 1940 - protein, 504 aa, Solanum lycopersicum
MSVTSESDDRMTSQDGVDSPSAEEACGGGNTGGGLPLKKGPWTSAEDAILVEYVTKHGEGNWNAVQKHSGLARCGKSCRLRWANHLRPDLKKGAFTPEEERHIIELHAKMGNKWARMAAELPGRTDNEIKNYWNTRIKRRQRAGLPIYPSDICFQSITENKQNEELGTFSSADSQYPDFFPMNYEIPAVEFKRLEFNQHLCPPALLDIPTGGILDIPGRSLLAQGLNSAYYSRSFLSTTPPAKRIRGSESLFSGLNGDCSPSKNDVSFSTCHQHQDDGSLLAQSMGFSSSFNQNLTSDYHPSSLGVIPGSHALLNGHTSSSEPSWAKKLELPSLQSTIASWGLVTSPLPSLDSVDTLIQSPPTEHTESCNLSPRNSGLLDAVLHESQTMKASKSILHQENSGDVVDNSCPDLHMTEWGQHGDPISPLGHSAASVFSEYTPTSGSSSEEPQLVTMPACKVKQEKFDYGPYDGKDDASNLICPRPDFLLESNCFGHMQNTVRSIWY

SEQ ID NO: 1941 - protein, 312 aa, Zea mays
MGLPMRRERDAEAELNLPPGFRFHPTDDELVEHYLCRKAAGQRLPVPIIAEVDLYRFDPWDLPERALFGAREWYFFTPRDRKYPNGSRPNRAAGNGYWKATGADKPVVPRGRTLGIKKALVFYAGKAPRGVKTDWIMHEYRLADAGRAAAAKKGSLRLDDWVLCRLYNKKNEWEKMQLGKTAVAGVGATKEEAMDMATSHTHSHSQSHSHSWGETRTPESEIVDNDPFPELDSFPAFQDPAMMMTVPKEEQVDGCSAKSGNLFVDLSYDDIQGMYSGLDMLPPPGEDFYSSLFASPRVKGNQPAGAAGLGQF

SEQ ID NO: 1942 - protein, 266 aa, Glycine max
MRKRINMESDADFNSFATSSSSTTPSIFFDTNTSSTSSSSTSPTSNSESCTKEHSKTPQNDSTTSQTSLENGKDSKGCKKRQIDNSNQNHHPTYRGVRMRNWGKWVSEIREPRKKSRIWLGTYPTAEMAARAHDVAALAIKGHSAYLNFPELAQELPRPVSTSPKDIQAAAAKAANTAFEEVRHCQITEEEAEQNQAEQASSSTLSMDNPQEPSSSHSTIDDDTLFDLPDLFPDGNNGLCSFSSSWHLCAVDSGFRLEESFFYENH

SEQ ID NO: 1943 - protein, 121 aa, Triglochin maritima
IQIKRIENATNRQVTFSKRRNGLMKKAQELSVLCDAEVSLIMFSSSGRPSEYCTPTTNTKEIVDRYQRSKKIDLWKNEYETMQKKLNDLKKTNNDFRKKIRQRKGEDLDGLDPEELRGLEQ

SEQ ID NO: 1944 - protein, 218 aa, Petunia x hybrida
MQEMVRGKVQMKRIENATSRQVTFSKRRNGLMKKAYELSVLCDAEVAVVIFSQRGRLYEFSSSSMQKTIDRYRECARETLTNNSIQAQQQIQYLKEETENMAKKIEVLEVSRRKLTGQSLGSCSMNELQQIDSQLERSLKNIRARKSQLFEDEIERLKAKKNLLLEENARLSEKCGQMSREPALAPPDPLIQQQEKGNCSLSIKNSEVETDLFIGLRS

SEQ ID NO: 1945 - protein, 121 aa, Triglochin maritima
IQIKRIENITNRQVTFSKRRNGLMKKAQELSVLCDAEVSLIMFSSSGRPSEYCTPTTNTKEIVDRYQRSKKIDLWKNEYETMQKKLNDLKKTNNDFRKKIRQRKGEDLDGLDPEELRGLEQ

SEQ ID NO: 1946 - protein, 300 aa, Zea mays
MDIDLFPDIDLDALLASFSGDPAAVSGLIIPSPPPPAPATAHDAEAGSPESVTSRTNPLGEVALSEIERLLMQEGEAELGGEVDGISVDQFFDALYDGEEAKGEREAGASADVDSGRDDVLEVVTPEAGTVEVDGDDPISKKKMRQMRNRDSAMKSRERKKSYIKDLETKSKHLEAECRRLSYALQCYAAENMALRQSLLKDRPLGAPTATQESAVLTETLPLVSLLWLVSIVCLFLMPVLPNRSPAAPSSGGRDLVMAAGKTSSETPEILELILHGRRCKSTRAKIKLCILPFHAGAAC

SEQ ID NO: 1947 - protein, 248 aa, Oryza sativa (japonica cultivar-group)
MGCKACQKPKVHYRKGLWSPEEDQKLRDFILRYGHGCWSAVPVKAGLQRNGKSCRLRWINYLRPGLKHGMFSREEEETVMNLHATMGNKWSQIARHLPGRTDNEVKNYWNSYLKKRVEGAEAAARKSAEPADVVTGSPNRSETGQERVAADRPASSESSGPVESSSADDSSSLTEPAAGLAAVRAARARDPQGHVRRLVDVPCGGAVDSLHGLGDGGFCWDFDDAADHMQGGGGLCDLLSMSEFLGIN

SEQ ID NO: 1948 - protein, 210 aa, Eucalyptus grandis
MVRGKIQLRRIENTTSRQVTFSKRRNGLLKKAYELSVLCDAEVAVIIFSQKGRLYEFSSNSEIQKTIDRYRRSTYDMDTYKTNLDQCILHLKQETTDMERKIELLEVSLRKLSGECLGSCSIDEIQMIGDQLERSLSSIRARKAQLFDDQIQHLQAKERSLKEENAKLLAKCLANPGQSTAHPRAAALHSRSSRSTDVETGLFIGLPELN

SEQ ID NO: 1949 - protein, 298 aa, Oryza sativa (japonica cultivar-group)
MGRTPCCDSKVLKKGPWTPDEDKLLVDYVQANGSGNWRLLPKLAGLNRCGKSCRLRWTNYLRPDIKRGPFTPEEHKSILQLHAIVGNKWSMIAAQLPGRTDNEIKNYWNTNVKKQLRQGQAAAVGEQAALASLGGGAASCPAARHMAQWETARLEAEARLSLLSGTTSVATASVAASSSSSSTAAGGGAEAPQDIYLRLWNSEVGDSFRKSARSAAREDQEPANASDEAAPVSATFARPGDDSSAASNVTAAAAADEYQVFLDLAAEDFELFHGRHGGFPLFPAVDMLGETSLYTAFD

SEQ ID NO: 1950 - protein, 231 aa, Arabidopsis thaliana
SSLSILNHLLIKDHHHMALDTLNSPTSTTTTTAPPPFLRCLDETEPENLESWTKRKRTKRHRIDQPNPPPSEEEYLALCLLMLARGSSDHHSPPSDHHSLSPLSDHQKDYKCSVCGKSFPSYQALGGHKTSHRKPVSVDVNNSNGTVTNNGNISNGLVGQSGKTHNCSICFKSFPSGQALGGHKRCHYDGGNGNSNGDNSHKFDLNLPADQVSDETIGKSQLSGEETKSVL

SEQ ID NO: 1951 - protein, 306 aa, Zea mays
MKERQRWRPEEDAVLRAYVRQYGPREWHLVSQRMNVALDRDAKSCLERWKNYLRPGIKKGSLTEEEQRLVIRLQAKHGNKWKKIAAEVPGRTAKRLGKWWEVFKEKQQRELRDSRRPPPEPSPDERGRYEWLLENFAEKLVGERPQQAAAAPSPLLMAAPVLPPWLSSNAGPAVAAAAVAHPPPRPPSPSVTLSLASAAVAPGPPAPAPWMPERAAADAAPYGFPSPPQHGGAAPPGMTVVDGQALAELAECCRELEEGRRAWATHRREAAWRLKRVEQQLEMEREMRRREVWEEFEAKMRTMRLE

SEQ ID NO: 1952 - protein, 314 aa, Oryza sativa (japonica cultivar-group)
MGMRRERDAEAELNLPPGFRFHPTDDELVEHYLCRKAAGQRLPVPIIAEVDLYKFDPWDLPERALFGAREWYFFTPRDRKYPNGSRPNRAAGNGYWKATGADKPVAPRGRTLGIKKALVFYAGKAPRGVKTDWIMHEYRLADAGRAAAGAKKGSLRLDDWVLCRLYNKKNEWEKMQQGKEVKEEASDMVTSQSHSHTHSWGETRTPESEIVDNDPFPELDSFPAFQPAPPPATAMMVPKKESMDDATAAAAAAATIPRNNSSLFVDLSYDDIQGMYSGLDMLPPGDDFYSSLFASPRVKGTTPRAGAGMGMVPF

SEQ ID NO: 1953 - protein, 316 aa, Glycine max
MGSQGGGDNNGKHSQLQPLVRQNSMYSLTLDEVQNHLGDLGKPLSSMNLDELLKNVWTVEANQSTGVDIEGTAQTRQAALQRQASLSLTSALSGKTVDEVWRDIQQSKDNKDKKSQERQSTLGEMTLEDFLVNAGVVAEASTRKNTGATIGVDSNVVAPQFPQHGPWIQYPQPQYQHPQQGLMGIYIAGQNIAQPLHMGAGAASDVPYADGQVALSSPVMGTLSDTRRPGRNGGTPEDMIEKTVERRQKRMIKNRESAARSRARKQAYTTELEHKVSRLEEENEKLRRQQELEKMLSSAPPPEPRYQIRRTSSASF

SEQ ID NO: 1954 - protein, 211 aa, Kalanchoe blossfeldiana
NGLFKKAEELTVLCDAKVSIIMISSTQKIHEYISPGITTKQVVDLYQKASNTDVWSKQYERMQETLRKVKEMNKRLRTEIRQRMGQCLNDLSFEELRGLEQDMDNAVTAIRARKYKAIGSRTDTLRKKVRNVEEIYRKLNQELVCGQPHFEYNREAREEDRHYGLVDNNSGDYESVIALGPRVLALRLNPNQPANMQACAGGSDLTYTLMN

SEQ ID NO: 1955 - protein, 201 aa, Pachysandra procumbens
NGIFKKAKELSVLCDAKVSIIMVATNRKLHEYTSPHTTTKDLYDLYQKASGNSLWNSHYERMKDNLNKLKDINNKLRTEIRQRMGEDLNDLRLEELRGLEQNIQESLMIVGDRKEHQLRNQIGTYKKKSRNAEEINRKLLRRLDGIDDDSQYGLEDDGGDDESAIALTNGNSHIFAFRLQPNQPNLHINGGGYGFHNLPLA

SEQ ID NO: 1956 - protein, 214 aa, Pachysandra procumbens
ENTTNRQVTYSKRRNGIFKKALELSVLCDAKVSIIMVATNRKLHEYTSPHTTTKELYDLYQKASGKSLWNSHYERMNDNLNKLREINNKLRTEIRQRMGEDLNELRLDELRGLEQNMEECLKNIRDRKEHQLRNQIGTSKKKTRNAEEINRKLIRRLDGMDDDSQYGLEDDGVDDEPAIALTNGNSHIFAFRLQPNQPNLHNEGGYGFHNLHHA

SEQ ID NO: 1957 - protein, 200 aa, Pachysandra procumbens
TGIFKKAKELSVLCDAEVSIIMFSSTKRYHDYTSPSTTTKKIYDRYQKASGTDLWNSHYERMQDNLKKLKEVNNKLRREIRRRLGEDLNDMSIGEVRGLEQNMEDSLTIIRQRKDHTLGTQVQTYKKKYNSAEEYNRKLLHQFNSSDGDPHYGLVDNDGDYESALAMANGSSHLFAFRLQPNQPNLHNGGGYDLHDLRLG

SEQ ID NO: 1958 - protein, 472 aa, Zea mays
HLLLAAGASADALAFSGLRAGDLLPRANAAADRDRALRVLLKSPAASPSSSPKKSASPPPPTAAAAAPEPRKEYPPDLTLPDLKSGLFSTDEFRMYSFKVKPCSRAYSHDWTECPFVHPGENARRRDPRRFSYSCVPCPEFRKGGACRKGDNCEYAHGVFECWLHPAQYRTRLCKDEVGCARRICFFAHKPEELRAVNPSAVSVGMQPTVSSPRSSPPNGLDMGAMLNPAWPSSPASRLKTALAAGRELDLDLELLALDQYQQKLFDKVSSPRAGWGGGMGSPLPAAAPSTRAVPDYADLLGSVDPAMLSQLHALSLKQAGDMPAYSSMADTQLHMPASPMVGPNSAFGLDHSMAKAIMSSRASAFAKRSQSFIDRGGRAPAARSLMSQQPTAGAPSMLSDWGSPDGRLDWGVQGDELHKFRKSASFAFRGQSPAPAPAPAEPDVSWVNSLVKDGHAGDIFAQWSEQEQMVA

SEQ ID NO: 1959 - protein, 196 aa, Paeonia suffruticosa
NGIFKKAQELTVLCDAKVSLIMISNTGKIHEYISPTTTTKKIYDQYQKVMKTDLWESHYEKMLDTLEAHKKVNNKLRREIRQRMGEDLNHLDYGELCSLEQKMEASVAIIREQKFHKIKTQTGTYRKKLDNVKQKNGALLLGFEAKCGDPHYGLVDSEGDYESVAAFANGASNLYAFRLHSSDHGAGYGTHDVHFS

SEQ ID NO: 1960 - protein, 236 aa, Brassica napus
MAQLPCDNDGACLRCKAKPPQEETLTCGTCGTPWHAACLSSPPETLASTLQWHCPDCSGEIDPLLPVSGAESGGGSDLVAAIRAIEADESLTDADKAKKRQELLSGKSATDEDDDEEEGKKSAGGLDVDLLKALGENLNCSFCIQLPERPVTTPCGHNFCLKCFEKWIGQGKRTCAKCRSPIPPKMASNPRINSSLVSAIRLARVSKSAGAGTGKVFHFISNQDRPDKAFTTERAK

SEQ ID NO: 1961 - protein, 277 aa, Oryza sativa (japonica cultivar-group)
MTAATAAGAFGFGRTRADMEPSSQPQPVMGVATGGSQAYPPPAAAYPPQAMVPGAPAVVPPGSQPSAPFPTNPAQLSAQHQLVYQQAQQFHQQLQQQQQQQLREFWANQMEEIEQTTDFKNHSLPLARIKKIMKADEDVRMISAEAPVVFAKACEVFILELTLRSWMHTEENKRRTLQKNDIAAAITRTDIYDFLVDIVPRDEMKEEGLGLPRVGLPPNVGGAADTYPYYYVPAQQGPGSGMMYGGQQGHPVTYVWQQPQEQQEEAPEEQHSLPESS

SEQ ID NO: 1962 - protein, 305 aa, Oryza sativa (indica cultivar-group)
MTRRCSHCSHNGHNSRTCPNRGVKIFGVRLTDGSIRKSASMGNLSLLSSAAGSTSGGASPADGPDAAPTADDGYASDDFVQGLLLRHPRPQEGFGRFDGVLLLAVTASCFFQAGQTLEKAFNGQIVLMVFLGLKKNTGGFCLDCKSLAKSMDLPPLPGGQEPETQVLNQPALPPPREEEEVDSMESDTSAVAESSSASAIMPDNLQSTYPVIVPAYFSPFLQFSVPFWQNQKDEDGPVQETHEIVKPVPVHSKSPINVDELVGMSKLSIGESNQETVSTSLSLNLVGGQNRQSAFHANPPTRAQA

SEQ ID NO: 1963 - protein, 207 aa, Zea mays
MTTRPDGSASTPADKQLVAASNGNGNGNPLAVRKAPSKDRHSKVDGRGRRIRMPIICAARVFQLTRELGHKSDGQTIEWLLRQAEPSIIAATGTGTTPASFSTSSPSSLRSSSSSTAGVHPHAAPAQGFWALPARADFGQLWSFAAAPEMMVAAAAAAAPGMAGEASAARVGNYLPVAQGNLNLLASFSGGPAPTAAAGRAEEETAR

SEQ ID NO: 1964 - protein, 425 aa, Oryza sativa (japonica cultivar-group)
MAAAADAPPPPPEVAPPAPAPAPAPAPYQPPRLAVADGAGGGGGGGGKPCRHHAYSRKQKSLGLLCTNFVALYDREDVESVGLDDAARRLGVERRRIYDIVNVLESIGMLVRRAKNRYTWIGFGGVPAALAKLKEMSLRAVSSVASPSLDETSAANVSDDEDDDKLDDAEGDAESEKLSLSQSIDNPSDKPDAPPCKLRSEHRKEKSLGLLTQNFVKLFLTMEIETISLDEAAKRLLGEGHAANNMRTKVRRLYDIANVLSSLNLIEKTQQADSRKPAFRWLGQAKRNEGVTVALPPTKTLPNKRAFGTDLTNIDNKRGKLDSTMENRGKPTQDGGNLFNNLQRQLGQENRSDFVYGPFHPAVARKQEHGNRTVQEKERKSIQDWENLASSFRPQYQNPGLNDLFGHYMEAWRSWYSDLRRDRAS

SEQ ID NO: 1965 - protein, 252 aa, Gnetum parvifolium
MGRGRVQLRRIENKINRQVTFSKRRNGLLKKAYELSVLCDAEVALIIFSTRGKLYEFASSSMSKTLERYEKCSYSMQENASTDRDAQNWHHEVTKLKAKLESLHKAQRNLMGEDLGPLNIKELQSLEQQLEVALGHVRNRKTQLLIQTIDELRDKERTLQEVNKSLQKKLSETEGRNVIPALPHATTGSGEWESSTLTTTYALQTQQPSGIHHVDCEPTLHIGPYHQAVHHEAIPGPPATHSEPHNQYIWWV

SEQ ID NO: 1966 - protein, 245 aa, Petunia x hybrida
MGRGRIQLKRIENKISRQVTFSKRRSGLLKKAHEISVLCDADVALIVFSTKGKLFEYSTESSMESILERYERYSYAERKLNANDSDPKENWTLEYPKLMSRIELIQRNIRHYMGQDLDPLSLRELQSLEQQIDTALKRIRSRKNQLMHESISELHKKERALQEQNNLMTKKLKENEKTQSGQTQPISSQNDATFMVPQPPSLSHHVANLTIGGAFGAKTVTNTNGVQASNSQMPPWMIRHVNNEG

SEQ ID NO: 1967 - protein, 342 aa, Oryza sativa (japonica cultivar-group)
MQPPPMRERQRWRPEEDAILLAYVRQYGPREWSLVSQRMNRPLHRDAKSCLERWKNYLRPGIKKGSLTDDEQRLVIRLQAKHGNKWKKIAAEVPGRTAKRLGKWWEVFKEKQQRELRDRDRRRLPPPLDGDERGCAGGRYDWLLEDFADKLVNDHHRRMMAAPILPPWMSSSPSSSSSPSVTLSLASAAVAPAPAAPPPTWGGGGGGEVVVAELMECCREMEEGQRAWAAHRKEAAWRMKRVEMQLETERACRRREATEEFEAKMRALREEQAAAVERVEAEYREKMAGLRRDAEAKEQKMAEQWAAKHARLAKFLDQVAACRRWPPVEINGGGGGGPGGGR

SEQ ID NO: 1968 - protein, 400 aa, Solanum lycopersicum
MAETSRLGIRNTVGEIVEVQGGHIVRSTGRKDRHSKVCTAKGPRDRRVRLSAHTAIQFYDVQDRLGYDRPSKAVDWLIKKAKPAIDELAELPAWKPTIGTASAAAATNTNLEQEQAQKQQEDNNFAFQQGNVSLFDNVAGPSSKRAIESNTASFLPPSLESDAIADTIKSFFPMGSSTSANSSAMQFHSFQEPHMLSRANSQNQDLSLSLQFQDPILLHHQNQQAQHHNQTNHREQEQVQGQAPAHFGGNTPLGFDTSGWSMHQRLRSWSDSREIGPGGSGGAVTGPGGYLFNSPPAPALLQQLFGQNQFFSQRGPLQSSNTSSVRAWMDPSAIAIASGDPSNHHQAALSMYPSTIPGYGFASEVGGFSGFRIPARIQGEEEEHDGISDKPSSASSDSRH

SEQ ID NO: 1969 - protein, 245 aa, Houttuynia cordata
MGRGRVQMKRIENKINRQVTFSKRRMGLLKKAHEISVLCDADVALIVFSTKGKLYEYATDSSMTKILERYERYSFAEREFALADNESEGAWSLEFGKLKARVEALQKTHRHYLGEDLDSLKVKELQHLEQQLDSALKHVRLRKNQVIQETISELQKKEKALQEQNNMLEKKVQEKQKAKAQQTRWENQSQNQNSAPFLFSLPLPNLNMGTYHQENGTEIREQEAARPLAHSNSQMPAWMLRHASE

SEQ ID NO: 1970 - protein, 202 aa, Arabidopsis thaliana
MVRGKIEIKKIENVTSRQVTFSKRRSGLFKKAHELSVLCDAQVAAMIFSQKGRLYEFASSDIRNTIKRYAEYKREYFVAETHPIEQYVQGLKKEMVTMVKKIEVLEVHNRKMMGQSLDSCSVKELSEIATQIEKSLHMVRLRKAKLYEDELQKLKAKERELKDERVRLSLKVGERPMGMPSGSKEKEDVETDLFIGFLKNRP

SEQ ID NO: 1971 - protein, 400 aa, Nicotiana tabacum
MNFKNFADTPQTESNSGMSMGSGNFPLARQYSVCSLTFDELQSTCGLGKDLGSMNLEDLLKNIWTAEESQVVASSAGVGNLQREGSLTLPRTLSQKTVDELWRDFQKETTVSSKDVSGTEWPNLGQRQSTLGEMTLEEFLVRAGVVREDMQPTGSSTDVRFTGGLSQPSTNNNGLNIAFQQPTQTPGLLSNQFEDNNMLNVVSATSSQQILNVAFTSPMQLGTNVQLANAGAREPAVSMSSPSVNTSTIVQGSVMQGGTKGLAGLRNGVTPAKRGSPGNQLSPDMMSKKVLDRSSLSPSPYAFIEGGKGRRPCNSLEKVVERRRKRMIKNRESAARSRARKQAYTLELEAEVEKLKEINKELHKKQAEFIEMQKNQLMEKMNMPWGNKLRCLRRTLTGPW

SEQ ID NO: 1972 - protein, 218 aa, Houttuynia cordata
MGRGKIEIKRIENDTNRQVTFSKRKNGLFKKADELTVLCDAQISIIMFSSTDKLHEYCSPSTTHKHIYDRYQKSGKEDLWRSHYEKMKNQLHMHMEENERLRKEIRQYMGEDLSGLSFNELRGLEQNMERASNIVRNKKNHVITTRAETSRKKVRALQKAHKDLAYAVGLLKAERENYGGPDYRYVVGSTNIGSHIFACPYQPNLHDASYGIPDLRFG

SEQ ID NO: 1973 - protein, 258 aa, Jatropha curcas
MESKNRKWLQERSNSTGNNLNQNSNTAETRYRGVRKRPWGRYAAEIRDPGKKTRVWLGTFDTAEEAARAYDAAAREFRGSKAKTNFPTVTELNNAAAAAVAAGAVTVARSPSQSSTVESSSPTPPRAASPPPPLDLTLNIPSHQHHHLRHGHFPTGVIFPGGAWISLAAEAHPVFFFDAFSVQGESNNNNKNNIINNNKIHSKNINLCRLDRTVMVSSGVHSDSDSSSVVVDYDHDRSPCNKGLSLDLDLNFPPAEVA

SEQ ID NO: 1974 - protein, 360 aa, Oryza sativa (indica cultivar-group)
MEGNGCGGSGATPRGVVGMHWAPVVTSPPSPQPPFLPPAPCRPDVQMQQQGGLTCLKLGKRPCFWGGDGAGQVAQGSGGGGGGGGGGSADQGKRKEKAATAVPVVPRCQVEGCDITLQGVKEYHRRHKVCEVHAKAPRVVVHGTEQRFCQQCSRLHVLAEFDDAKKSCRRRLAGHNERRRRSNASEAMARGSAHPHGMPVLGHGFPPYGLPTSSAGALSLLSSARATGPWLMPTPDISARSSAALDELIAENRAALLSWQFFSDRQPPPAGRPTGRSPGSETAGGWHAHLQAPPPPPGAGGQHEHQSGHVTLDLMQATTAAGGSGAPFRPVPARPAKEGGDAGCTSDAWTPSPMEGARVV

SEQ ID NO: 1975 - protein, 243 aa, Houttuynia cordata
MGRGRVELKRIENKINRQVTFAKRRNGLMKKAFELSVLCDAEVALIVFSSRGKLYEFCSSSGMMKTIERYQKCNYGAPEATVSTKEIQSSYQEYMKLKARVESLQRSQRNLLGEDLGPLTGKELEQLERQLDMSLKQIRSTRTQCMLDQLSDLQRREQMLSEANKALRRRLLQLDDGSQTNPHHSWDPNAHGVGYSRHPGQPQGEVIFDPLDCEPTLHIGYQPDQITIAAPGPNGNYMQGWLP

SEQ ID NO: 1976 - protein, 196 aa, Paeonia suffruticosa
NGIFKKAQELTVLCDAKVSLIMISNTGKIHEYISPTTTTKKIYDQYQKVMKTDLWKSHYEKMLDTLKRHKEVNNKLRREIKQRMGEDLNHLSYQELRSLEQNMEASVAIIRERKYHKLKTQTDTYTRKVNGVEQKIENLMLGFEAKCGDPHYAPVENEGDYESAAAFANGASNLYAFRLHSSHHGEGYMMCTSLES

SEQ ID NO: 1977 - protein, 561 aa, Oryza sativa (japonica cultivar-group)
MDADEAAGSSRRMDLNLYLGLPRAPRPRRSDLGSDLALSTPMPSSPSSSAASVDAPPPPPELSHPPYSPSHADLSPPLQEVYSLYNPDDPPASETHLPPYAPPPAPVVSELPDDLEFGLHPPPPLVRASELLGWEDRPSSSTASSSFLPDTAARYWRLLEQTGSRWLRARRFRSDLPPLSSEAYPAGRDAAAVPVLQHEPMNDTVEHNKVAADGAEVGASEESEEQGRSAATFECNICFDMASEPVVTSCGHLFCWPCLYQWLNVYSNHKECPVCKGEVTEANITPIYGRGNSCLDAEKAVEGGKQTGPTIPPRPHGNRLESFRQQFHHLRPISRRLGEAHGLLSSWRRLLDQQIMNTASRFEGPPESAVQEMVDTAHAQHTSRLSRLASRMRARRLLREADNPNPPDGGSTSPDSGLIRNNASDPSRNGPSSLLPDGIDWLRGLTLLGYEDTERFASAMSDFRRITGPSQYGASASSSNPPNLESTFDRTHVVAAPSADQASNSSTAAVIQGDAGISESAGEPSNAGSSRSLRRRGRSSALGSLDADGGGLQRNKRRRIN

SEQ ID NO: 1978 - protein, 200 aa, Phytolacca americana
ENKTNMQVTFSKRRNGIMKKAHELTVLCDATVSLIMVSATARLHHYLSPGASVKKIYDQYQKIMCVDIWSSHYEKMQKEERDHLEINNMLRREISRRMGGDLEDMSIQELCGLEQEMEKAVEVIRNQKFHKIKSQTGTGKKKVKNLKEVHGNLLMELESKFGGSQFGLADEDQGAYEAAAAYPILQHGAGYANVHDLRLA

SEQ ID NO: 1979 - protein, 205 aa, Phytolacca americana
NGIMKKAHELTVLCDATVSLIMVSTTNKLHQYLSPGASIKNMYDEYQKLTGIDIWSTHYEKMQEKERKLLEVNNILRREISRRMGGDLEDLSIQELHGLEHEMEKALDVIRNQKFHKIKTQTGTSRKKVKNLEVVHGNLLMDLEAKFGAPQFGLADEDQGEYEAAAAYAANDAAAANLYAMSRHPCLPNLELGGGYANPHDLRLA

SEQ ID NO: 1980 - protein, 299 aa, Zea mays
MMRETYMDVLPPVDHIAARSNWFPAAARLWTAAENKQFERALAGLDLCRPDWEEVARAIPGRTVREVVSHFKHLEVDVQQIESGQVPLPAYGGGASSFTLQWDGYGPGPGDFRHGYRFAGGCGRRHHGRTPEQERKKGVPWTEEEHRLFLLGLKKYGKGDWRNISRNFVQTRTPTQVASHAQKYFIRLNSGGKDKRRSSIHDITTVNLTDDQPPSPSQSSLITSQSNAPAPSPAPAPAAGICQVPLAADVKRHGAGTLPFSSPNRTSAVPAYRMEFHDQQGLQCGPLHDQLLASQSVLF

SEQ ID NO: 1981 - protein, 205 aa, Saxifraga careyana
NGLFKKANELTVLCDAKVSIIMFSSTNKLQEFISPSLTTKQIYDEYQRVKEIDLWNTHDEKMQENLKKLREINNKLRRDIRQRMGASLIDLSFEELLAIEKEIETSLSVIRERKFKQLENQIGTSKKKGKNSEDIHRTLVHQFVNIDASSEDPQFGLVDNGGEYDNVLGYPNGGGHVFALHLPQTNQLNLHSGGGSDLTTFALLE

SEQ ID NO: 1982 - protein, 98 aa, Secale cereale
PELVKGPWSKEEDDVIIQMVKKYGPTKWSTIAQALPGRIGKQCRERWHNHLNPGINKDAWTQEEEIRLIQAHRIYGNKWAELSKFLPGRTDNAIKNHW

SEQ ID NO: 1983 - protein, 202 aa, Saxifraga careyana
NGIFKKAQELTVLCDAEVSLIMVSNTQKVHDYTSPNTTIKRMYDRYQRAKDIDLWSNHHDKMQNQLRKLKEINNGLRREIGHRMGEELQDLSFEQLVHLDQEISESLTVVRDRKYHVIKTQTSTYNKKMKSIVDAHKNLSLNFEAMYEDPQYAIAENEGAYENVAAFENCAANLYAFRLQMGNPNNLHHGEGSYGFQDLRLG

SEQ ID NO: 1984 - protein, 266 aa, Gnetum parvifolium
MGRGKIEMKKIECTSSRQVTFSKRRSGLLKKAHELSVLCDAEVAVIIFSNTGKLYEYASSSMRKTIERYQKFEENSTNSTKSFKTKSEQGSSADVGSLLLEMKAMENKHRNSMGEELSSLSVPELKRLEQELEVGINRVRARQNELFEAEICGLKRKEHDLIEENMMLHKLLSETGSSSEMAASAPAHSFGDESAMMACQYRQQVCMGESSSSRNQTRHHIYGVSDVARHLALQISCPNQSRNDYNLVLDGWEYMPEYAPPLVSMD

SEQ ID NO: 1985 - protein, 244 aa, Prunus persica
MEFPNQAPESSSQRKIGRGKIEIKRIENTTNRQVTFCKRRNGLLKKAYELSVLCDAEVALIVFSTRGRLYEYANNSVRATIDRYKKACTDSTNGGSVSEANTQFYQQESSKLRRQIREIQNSNRHILGEALSTLNIKELKNLEGRLEKGISRIRSKKNEMLFAEIEFMQKREMELQNHNNYLRAKIAENERAQQQQTNMIQGTSYDQSMPSQSYDRNFLPVILEANNNNNNHYSRHDQTALQLV

SEQ ID NO: 1986 - protein, 254 aa, Adiantum raddianum
DLLKDRSDVQCLHRWQKVLNPNLVKGPWTKEEDEKIAELVNKNGPKKWSVVARSLPGRIGKQCRERWHNHLDPHIKKDAWTPEEEQALIEAHQRNGNKWAEIAKSLPGRTDNAIKNHWNSSLKKKLEFTNLHRPVLDRLKELEGVSSGVGSTIGVSRSDCHTELAERVGASAGFSKPGQSEKAGENSFNRIRDTNRNRHLAGPGALGGSNCLSPFRTESVMLSNQRCSSIRNGSTLLVAARLNQVAAENDVAST

SEQ ID NO: 1987 - protein, 283 aa, Pisum sativum
MDPSSQQMSRQSSMENMLVCSKEQQESKPKPQPEQALKCPRCDSTNTKFCYYNNYSLTQPRYFCKSCRRYWTKGGTLRNVPVGGGCRKNKRSSSSKRIQDQAFAPNHNPFSNLPHFDQSNDFALRLARLQKQSCGGQMGYDENELSMLGNSGSSMNQSMSINHGFMDAIRSGLFLGNGMHYNNSVQNMYGGGYGNGDNGEVNSGNNNCGVSEEMMFNYDQEMSHCNAAINMKQEQSESRVFGGFPWQINGGIGNMGEVEQARASWNNGFTTPSWQGLLHSPLM

SEQ ID NO: 1988 - protein, 268 aa, Oryza sativa
MMGRGKVQLKRIENKINRQVTFSKRRNGLLKKAHEISVLCDAEVAAIVFSPKGKLYEYATDSRMDKILERYERYSYAEKALISAESESEGNWCHEYRKLKAKIETIQKCHKHLMGEDLESLNLKELQQLEQQLESSLKHIISRKSHLMLESISELQKKERSLQEENKALQKELVERQKNVRGQQQVGQWDQTQVQAQAQAQPQAQTSSSSSSMLRDQQALLPPQNICYPPVMMGERNDAAAAAAVAAQGQVQLRIGGLPPWMLSHLNA

SEQ ID NO: 1989 - protein, 241 aa, Theobroma cacao
MVYPNESCETSPQKKMGRGKIEIKRIENTTNRQVTFCKRRNGLLKKAYELSVLCDAEVALIVFSSRGRLYEYANNSVKATIERYKKTCADSSNTGSVSEANAQFYQQEAAKLRVQIGNLQNSNRHMLGESLSALPMKDLRSLENRLEKGISRIRSKKNELLFAEIEYMQKREIDLHNNNQLLRAKIAENERKQQNINLMPGGSNFEIMHSQPFDSRNYFQVNALQPANHYPHQDQMALQLV

SEQ ID NO: 1990 - protein, 235 aa, Oryza sativa (japonica cultivar-group)
MAPRAATVEKVAVAPPTGLGLGVGGGVGAGGPHYRGVRKRPWGRYAAEIRDPAKKSRVWLGTYDTAEEAARAYDAAAREFRGAKAKTNFPFASQSMVGCGGSPSSNSTVDTGGGGVQTPMRAMPLPPTLDLDLFHRAAAVTAVAGTGVRFPFRGYPVARPATHPYFFYEQAAAAAAAEAGYRMMKLAPPVTVAAVAQSDSDSSSVVDLAPSPPAVTANKAAAFDLDLNRPPPVEN

SEQ ID NO: 1991 - protein, 143 aa, Brassica napus
  misc_feature (29)..(29): Xaa can be any naturally occurring amino acid
  misc_feature (127)..(127): Xaa can be any naturally occurring amino acid
MEDKGKNIEQAQQSYLGWMSLQSQRVLDXKQALAQRRSHEGTADAATDEKKLRELTQKIIGDFKDYARKRADLSHRCSSNYYAPSWNTPLENALIWMGGCRPSSFFRLVYALCGSQTEIRVTQFLRXVDGYDTSGSGGASLSD

SEQ ID NO: 1992 - protein, 218 aa, Rosa rugosa
NGLLKKAYELSILCDAEVALIIFSNRGKLYEFCSSSSILKTLERYQKCSYGAMEVNEPAKELEQSSYREYLKLKTRCESLQRTQRNLLGEDLGPLNTKELEQLERQLESSLKHVRSTKTQYMLDQLSDLQSKEHMLIEANRDLTMKLDEINSGTQLRQTWERGHAHQTMLYGTQHAQTQGLMFQPLDCNPTLQIGYNAVGSQQMTAATPAPTQPVNGF

SEQ ID NO: 1993 - protein, 245 aa, Zea mays
MGRGKVQLKRIENKINRQVTFSKRRSGLLKKAHEISVLCDAEVALIIFSTKGKLYEYSTDSCMDKILDRYERYSYAEKVLISAESETQGNWCHEYRKLKAKVETIQKCQKHLMGEDLETLNLKELQQLEQQLESSLKHIRTRKNQLMLESISELQRKEKSLQEENKVLQKELAEKQKAQRKQVQWGQTQQQTSSSSSCFVIREAAPTTNISIFPVAAGGRLVEGAAAQPQARVGLPPWMLSHLSS

SEQ ID NO: 1994 - protein, 218 aa, Gossypium hirsutum
MSMKKEGEILYKKGLWAMEEDKLLIDYVNVHGKGQWNKIANRTGLKRSGKSCRLRWMNYLSPNVKKGDFSEEEEDLVIRLHKLLGNRWSLIAKRVPGRTDNQVKNYWNSHLRKKLGIIDQNKTRIDFCQSSKQVKVCHVDEAATDPSPGHGTTTETTGITVDQSNQHEVIDHRVLNNTTQESMTTEKYINTFWIPDHDYELSTLAMIDHFHEWVSFSP

SEQ ID NO: 1995 - protein, 190 aa, Oryza sativa (japonica cultivar-group)
MVGGEVMCEAAAPRYRGVRKRPWGRFAAEIRDPAKRARVWLGTYDSAEAAARAYDVAARNLRGPLARTNFPLVSSLPLPSPHYHLPGKAAAAAPPVAGPACSASSTVESSSGPRGPRPAATAAAVPRRRVPRPAPPAPDAGCHSDCASSASVVDDADDASTVRSRVAAFDLNLPPPLDRDHVDLCTDLRL

SEQ ID NO: 1996 - protein, 291 aa, Arabidopsis thaliana
MMKRLSSSDSVGGLISLCPTTSTDEQSPRRYGGREFQSMLEGYEEEEEAIVEERGHVGLSEKKRRLSINQVKALEKNFELENKLEPERKVKLAQELGLQPRQVAVWFQNRRARWKTKQLEKDYGVLKTQYDSLRHNFDSLRRDNESLLQEISKLKTKLNGGGGEEEEEENNAAVTTESDISVKEEEVSLPEKITEAPSSPPQFLEHSDGLNYRSFTDLRDLLPLKAAASSFAAAAGSSDSSDSSALLNEESSSNVTVAAPVTVPGGNFFQFVKMEQTEDHEDFLSGEEACE

SEQ ID NO: 1997 - protein, 173 aa, Brassica napus
MLLARDGNRTRHLPSSSSSPPLLPTLTSTHLHKCSVCDKAFSSYQALGGHKASHRKNSSQTQSSGGDEKSTSSAITIASHGGGGGGSVKSHVCSICNKSFATGQALGGHKRCHYEGKNGSSSEGVGSTSHVSSGSHHHHRGFDLNIPPIPEFSTVNGEEEVMSPMPTKKLRLE

SEQ ID NO: 1998 - protein, 314 aa, Hordeum vulgare subsp. vulgare
MTRRCSHCSYNGHNSRTCPNRGVKIFGVRLTDGSIRKSASMGNLSLLGGSTSGGGGASPADVGHDAAAEGYASDDFVQGSSSANRERKKGVPWTEEEHRRFLLGLQKLGKGDWRGISRNFVVSRTPTQVASHAQKYFIRQANMSRRKRRSSLFDLVPDESDLPPLPGNHEPEAQILNHPPLPPPMEEEEVESMESDTSVIAESSSASAIMPENLQPSYPVLVPAYFSPFLQFSVPFWQNQNDGDDLGQGTHEIVKPVPVHSKSPINVDELVGMSKLSIGDPKQDTVSTSLSLKMVGGQNRQSAFQANLPTRAQA

SEQ ID NO: 1999 - protein, 166 aa, Zea mays
AAVNSVAVGRKQKSLGLLCSNFVALYDREDVEVIGLDDAAKRLGVERRRIYDIVNVLESVGILVRRAKNRYTWLGFGGVPAALKELKVRALRKMSGSPVLLSMEDSSTANLSDDEDDEKLGDADEDAESEKLSQPVDNTSDKPDAPSCRLRSDHRKEKSPDSNGIR

SEQ ID NO: 2000 - protein, 84 aa, Hyacinthus orientalis
PRAAAGRCLPCPRCKSKETKFCYFNNYNVNQPRHFCRNCHRYWTAGGTLRRVPVGAGRRKNRTPPPCGADGVGEADQAVWPAGS

SEQ ID NO: 2001 - protein, 275 aa, Zea mays
MSCAGQAGGWLLDYALVEEEIQGSEFIYMVDDPAVSSVILGFDAPRKEDGVQDNPGAKKRQSFSSSFLSVDPQHKVKLGEFRMPSRSLQRYNHEWVGISRPESSAPPGTKACREKLRRDRLNERFNELCAILEPGKPPKADKVAILSDAARLLNQLQGEAQKLKQSNESLQESIKSLKAEKSELRDEKTRLKAEKERLEQMLKGVVSHAAVAAPGPFVPHPAAVAPSFHHHPAAFAQAGKFVPYPSYPPPAAFWQWIPPTSLDTTKDPAHWPPVA

SEQ ID NO: 2002 - protein, 283 aa, Arabidopsis thaliana
MMMGKEDLGLSLSLGFSQNHNPLQMNLNPNSSLSNNLQRLPWNQTFDPTSDLRKIDVNSFPSTVNCEEDTGVSSPNSTISSTISGKRSEREGISGTGVGSGDDHDEITPDRGYSRGTSDEEEDGGETSRKKLRLSKDQSAFLEETFKEHNTLNPKQKLALAKKLNLTARQVEVWFQNRRARTKLKQTEVDCEYLKRCVEKLTEENRRLQKEAMELRTLKLSPQFYGQMTPPTTLIMCPSCERVGGPSSSNHHHNHRPVSINPWVACAGQVAHGLNFEALRPRS

SEQ ID NO: 2003 - protein, 406 aa, Oryza sativa (japonica cultivar-group)
MSFRSVIQEVKGEIGAISRRGFRSRPGRVRRVAAAAEEPPDESSAAALVMRESCWTQLPPELLREVLARVEESEGWWPRRRDVVACAGVCRSWRGIVREIVRTPEASGNLTFPISLKQPGPRDAPMKCFIVRNRTTQTYYLYIGLTDALTDDGKFLLAARKCRRTTCTEYLISLDMNDISKRTDSYVGKLRSNFLGTKFTIYDAHPPYAGDVISKGQSARVIGSNHLSPRIPAGNYPVSHISYELNVLGSRGPRRMHCAMDSIPVSAIEQGGTAPTQTEFPLSYHESFTSIPFFKSKSVRANNSTASLLTQNGSKLVLKNKSPRWHEHLQCWCLNFHGRVTVASVKNFQLVASDESNPTNQEHDDVILQFGKVGKDMFTMDYRYPISAFQAFAICLSSFDTKIACE

SEQ ID NO: 2004 - protein, 379 aa, Arabidopsis thaliana
MSDLSPERFKLAVTSPSSIPESSSALQLHHSYSRKQKSLGLLCTNFLALYNREGIEMVGLDDAASKLGVERRRIYDIVNVLESVGVLTRRAKNQYTWKGFSAIPGALKELQEEGVKDTFHRFYVNENVKGSDDEDDDEESSQPHSSSQTDSSKPGSLPQSSDPSKIDNRREKSLGLLTQNFIKLFICSEAIRIISLDDAAKLLLGDAHNTSIMRTKVRRLYDIANVLSSMNLIEKTHTLDSRKPAFKWLGYNGEPTFTLSSDLLQLESRKRAFGTDITNVNVKRSKSSSSSQENATERRLKMKKHSTPESSYNKSFDVHESRHGSRGGYHFGPFAPGTGTYPTAGLEDNSRRAFDVENLDSDYRPSYQNQGAYILFTSI

SEQ ID NO: 2005 - protein, 331 aa, Oryza sativa (indica cultivar-group)
MFPPFSHLRRRLLAAIPNPNLLLRPSRSLSTSTTPATRAPATPVDVLWDLAASRPPSTLPLYDAAVRLHLAATSFGRVRLSAAFVHPGHRLPAPSPSAAAAAVHLCRVCGRRFRARDTLLRHFDAIHAREHAKRLARIDSSRGDRRVRLAAALSLKLSKYEKAARELTAAADPCSPADDLRRARVAVELSPTPSVSLLERAHEVLDGGSVRCLMLVSARDELAPLLRLAREKGVRSVVVGGESGPARWADVGFSWAEVIAGKARKAAPSVSGKWRDRDVLKRLEWRYDDDDEEVVFEEDGDEDGIDELTRNSKGKPWWKLESDGEDSSACR

SEQ ID NO: 2006 - protein, 384 aa, Arabidopsis thaliana
MSSSSSTTQVVSFRDMGMYEPFQQLSGWESPFKSDINNITSNQNNNQSSSTTLEVDARPEADDNNRVNYTSVYNNSLEAEPSSNNDQDEDRINDKMKRRLAQNREAARKSRLRKKVTLAHVQQLEESRLKLSQLEQELVRARQQGLCVRNSSDTSYLGPAGNMNSGIAAFEMEYTHWLEEQNRRVSEIRTALQAHIGDIELKMLVDSCLNHYANLFRMKADAAKADVFFLMSGMWRTSTERFFQWIGGFRPSELLNVVMPYVEPLTDQQLLEVRNLQQSSQQAEEALSQGLDKLQQGLVESIAIQIKVVESVNHGAPMASAMENLQALESFVNQADHLRQQTLQQMSKILTTRQAARGLLALGEYFHRLRALSSLWAARPREHT

SEQ ID NO: 2007 - protein, 552 aa, Arabidopsis thaliana
MDSDDDMHDMDSVDYDYYSGGTYDDNDSDETDFGFGEADTDDAAIIASYRSKSNYVVLKEEDIRRHQNDDVGRVSAVLSITDVEASTLLLHYHWSVSKVNDEWFADEERVRRTVGILEGPVVTTPDGREFTCGICFDSYTLEEIVSVSCGHPFCATCWTGYISTTINDGPGCLMLKCPDPSCPAAIGRDMIDKLASKEDKEKYYRYFLRSYVEVNREMKWCPAPGCEHAIDFAGGTESYDVSCLCSHSFCWNCTEEAHRPVDCDTVGKWILKNSAESENMNWILANSKPCPKCKRPIEKNHGCMHMTCTPPCKFEFCWLCLNAWTEHGERTGGFYACNRYEAAKQEGLYDEAERRREMAKNSLERYTHYYERWASNQVSRQKAMGDLQKMQSEKLGKLSDIQCTPESQLKFIAEAWLQIIECRRVLKWTYAYGYYLQDHAKKPFFEYLQGEAESGLERLHKCVEKDIEVFELAEGPSEEFNHFRTKLTGLTSITKTFFENLVKALENGLADVDSQAASSKPANSKPSSKTKGGGKGKGSSKNGGSSRNPDGN

SEQ ID NO: 2008 - protein, 297 aa, Oryza sativa (japonica cultivar-group)
MGCRSCDKPKMNYRKGLWSPEEDQRLRDYIVKHGLGCWSAVPAKAGLQRNGKSCRLRWINYLRPGLKRGMFSQEEEDIVINLQAKLGNKWSQIAMHLPGRTDNEVKNYWNSYLKKRVMQAQGSIPNNLAAAAAEVTSMSTTEPPSLHHHHHHPHHHQIKNSSGSTTTSHDQDANLSSGGSHGGISAPAPVAEPFDQQPKSFVFTGDWMPMSAAAAGQESYSISAQHWPASTASSGNVTPSHGGAFGDQMSGSYGALQQQHQSSAAAAPMAGGGGYFDLLNMGDIYGGFAATSDDLLF

SEQ ID NO: 2009 - protein, 170 aa, Zea mays
  misc_feature (113)..(113): Xaa can be any naturally occurring amino acid
  misc_feature (137)..(137): Xaa can be any naturally occurring amino acid
MEGGASDEVAESSKKIGRGKIEIKRIENTTNRQVTFCKRRNGLLKKAYELSVLCDAEVALVIFSTRGRLYEYANNSVRGTIERYKKACSDAVNPPSVTEANTQYYQQESSKLXRRQIRDIQNLNRHILGESLGSLEXSRELKNLEGRLEKGIGRVRSKKHEMLVAEIEYM

SEQ ID NO: 2010 - protein, 123 aa, Kyhosia bolanderi
RQVTYSKRRNGIFKKAHELTVLCDAKVSLIMFSNTGKFHEYISPSTTTKKIYDMYQTTLGFDLWSSHYERMTETMKKLKDSNNKLRREIRQRVLGEDLDCLDMNDLTILEQQMQDSLTVVRER

SEQ ID NO: 2011 - protein, 504 aa, Oryza sativa (indica cultivar-group)
MATAGSRKGGRGRKALTAVLDNDANISAGKADVAAAAGILSPPQKAKRATSKSSKGKAAAAAAAEEQASVVDAVSELQGMLEKLRLEKEKAEEMVRERDEVIRRKEEEQGRLQAELKKVQRAKEFKPTVSIPLVKALIEKDQEGEKKKGKGKAGHERKKPCPAYVLWCKDQWNEIKKESPDADFKEVSNALGAKWKALGAEEKQPYEERYRQEKEAYLQVVGQEKREAEAMKLLEEERMQRTAKELLEQYLKFRQEADDDGDGGDNKKASKKGKKKKKEKDPSKPKQPMSAYFVYTQQRRAALVAEKKNVPEIGRITGEEWKAMSEAEKAPFEAAARKQREEYQVEMAAYRQRKQEEAACQEKEEEEQKKIMKQEALQLLKKKEKTDNIIKKTKEEQRKKKVGGAAAAADPNRPKKPASSFLLFSKEARRQLAEERPGVASSTLTALVSVKWKELGEAEKQAWNGKAAEAMAAYKRDMEEYTKAAASSGGGGDASPCTSSSASS

SEQ ID NO: 2012 - protein, 105 aa, Zea mays
MGSSWTESQNNLFERALAVYDKDTPDRWHNVARAVGCGKTAEDVKRHYKYLKTDVKHIETEEGGRGSQSSSPAGAGAGGSGSSSSSSWGRDNGDKRMTRHPNQPQ

SEQ ID NO: 2013 - protein, 252 aa, Triticum aestivum
MDHQLYGDPSASSFSPLEAQIFSGQLPPSSTPWPNLDVDLALDLDVLEDDIVRELSAGTVANAASSGSGSGAHKKLSHNAYERDRRKQLNELYLSLRSLLPDADHTKKLSIPTTVCRALKYIPELQKQVENLEKKKEKLASANCKPGVLSVTGSIAPTVSATCLNHKEIMVQISLLRDTDASTALPLSKCINVLENEGLQLISSSTSSTFGNQTFYNLHLQRSQGALNLECPSFCDKLEQAIMEAAGLYLQH

SEQ ID NO: 2014 - protein, 465 aa, Candida glabrata CBS 138
MDDFPSLNVSDLESKLLDYNIRDYEVQNSKHKNNIAGNEKESIDQLSLLNQVCSLKNRKAIDSTKNSPLFYQNVLLSKLACSKILCHATKGGNIEVMGMLLGNVIGNTFVIFDCFELPVEGTETMVNAHMESYEYMVQFYHEMVERSYTRNEENLNIIGWYHSHPGYDCWLSNIDMQTQSLNQQHQDPYLAIVVDPHKSKNDQKVRIGSFRTYQDQNDDTNFYELNTTVFDSELNKLENPLSVKIPFNSIESRNLESNYLQKLSETVKQWRNFKIMEKIENTAHTEDTTTNKSISTPGRIIQTAHEFAFAATSNGNGSRVNIMRSNSVSSIGSSSDIEMEDRNCSAFDSVASSINTIADPSRTSSIHTQMNNQNNQQERNSPKRPHILPAIQSSRYGVIFEGKDRPENKNFNIRTASAQDAFESKCIDDFHESLKNDYLTQKEILLRLKLRQYYRLRMYRDMFSK

SEQ ID NO: 2015 - protein, 253 aa, Nicotiana benthamiana
MALEALNSPTTTTPPTFQFENNGPLRYLENWTKGKRSKRPRSMERQPTEEEYLALCLIMLARSDGSANREQSLPPPPVPVMKIHAPPEEKMVYKCSVCGKGFGSYQALGGHKASHRKLVAGGGGGDDQSTTSTTTNATGTTSSANGNGNGSGKTHECSICHKRFPTGQALGGHKRCHYDGGNSNGGVSVSASVGLTSSEGVGSTVSHRDFDLNIPALPEFWPGFGSGEDEVESPHPTKKSRLSLPPKFELFRE

SEQ ID NO: 2016 - protein, 265 aa, Avena fatua
APAHAAHAQAAQALPQPPVQPPAVNGGGIAENDRQGTLGEMTLEQFLVKAGVVRGSLGGGQAPPMPVGMVHGPMHPMQQGQHQQPGPLMYQVAPVNAMYPGMGDGMGFVPNGYTGMAVVPPPAPSQGGVGIVSPGSSDGRSAMTQADAMNCIGSGAMVMENGAARKRPAPEDRPGEKSVERRHRRMIKSRESAARSRARKQAYTVELEAELNKLKEENARLKAEETTILLAKKQMLLEKMMEQSKENAKAKKGGARPRRSGSCIW

SEQ ID NO: 2017 - protein, 154 aa, Brassica napus
MALEAMNSPTTTSSFTVRKDRIGATDDLMNDAVFLEPWLKRKRSKRQRSPSPSSSPPRLHAKSQSQDPSEEEYLALCLLMLAKDQPRTRFQPSPPPPQERTTKLSYNCSVCGKAFVSYQALGGHKASHRIKPPTAGDSTAPSIAGEKHPTSTTI

SEQ ID NO: 2018 - protein, 272 aa, Avena fatua
VWAEINKEAPAHAAHAQAAQALPQPPVRPPAVNGGGIAENDRQGTLGEMTLEQFLVKAGVVRGSLGGGQAPPPMPVGMVHGPMHPMQQGQQPGPLMYQVAPVNAMYPGMGDGMGFVPNGYTGIAVVPPPAPSQGGVGIVSPGSSDGRSAMTQADAMNCIGSGAMVVENGAARKRPAPEDRPGEKSVERRHRRMIKNRESAARSRARKQAYTVELEAELNELKEENARLKAEETTILLARKQMLLEKMMEQSKENAKAKKGGARPRRCGSCIW

SEQ ID NO: 2019 - protein, 153 aa, Triticum aestivum
MEQLFVDDPAFASSMSSLEADIFSGAGQLPSSPWLDLDLDDDVQDLSMAPTTANAVSSGYGSGGSGSHRKLSHNAYERDRRKQLNELYSSLRALLPDADHTKKLSIPTTVSRVLKYIPELQKQVENLERKKKELTTTSTTNCQPRVLGSQLMS

SEQ ID NO: 2020 - protein, 296 aa, Arabidopsis thaliana
MGNQKLKWTAEEEEALLAGVRKHGPGKWKNILRDPELAEQLSSRSNIDLKDKWRNLSVAPGIQGSKDKIRTPKIKAAAFHLAAAAAAAIVTPTHSGHSSPVATLPRSGSSDLSIDDSFNIVADPKNAPRYDGMIFEALSNLTDANGSDVSAIFNFIEQRQEVPPNFRRMLSSRLRRLAAQGKLEKVSHLKSTQNFYKMNDNSLVQRTPHVARPKESNTKSRQQTNSQGPSISQQIVEASITAAYKLVEVENKLDVSKGAAEEIERLMKLAEEADEMLVIAREMHEECSQGKIMYLN

SEQ ID NO: 2021 - protein, 264 aa, Avena fatua
PAHAAHAQAAQALPQPPVQPPAVNGGGIAENDRQGTLGEMTLEQFLVKAGVVRGSLGGGQAPPMPVGMVHGPIHPMQQGQHQQPGPLMYQVAPVNAMYPGMGDGMGFVPNGYTGMAVVPPPAPSQGGVGIVSPGSSDGRSAMTQADAMNCIGSGAMVMENGAARKRPAPEDRPGERSVERRHRRMIKNRESAARSRARKQAYTVELEAELNELKEENARLKAEETTILLAKKQMLLEKMMEQSKENAKAKKGGARPRRSGSCIW

SEQ ID NO: 2022 - protein, 266 aa, Avena fatua
EAPAHAAHAQAAQALPQPPVQPPAVNGGGIAENDRQGTLGEMTLEQFLVKAGVVRGSLGGGQAPPMPVGMVHGPMHPMQQGQHQQPGPLMYQVAPVNAMYPGMGDGMGFVPNGYTGMAVVPPPAPSQGGVGIVSPGSSDGRSAMTQADAMNCIGSGAMVMENGAARKRPAPEDRPGEKSVERRHRRMIKNRESAARSRARKQAYTVELEAELNELKEENARLKAEETTILLAKKQMLLEKMMEQSKENAKAKKGGARPRRSGSCIW

SEQ ID NO: 2023 - protein, 242 aa, Antirrhinum majus
MGRGRVELKRIENKINRQVTFAKRRNGLLKKAYELSVLCDAEVALIIFSNRGKLYEFCSSTSMLNTLERYQKCNYGPPETNVSTREALELSSQQEYLKLKARYEALQRSQRNLLGEDLGPLNSKELESLERQLDMSLKQIRSTRTQAMLDTLTDLQRKEHALNEANRSLKHRLMDGSQISLQWNPNAEDHVGYGRQPSQPSADGFYHPLECEPTLHIGFQSDQITVAGAGPSVNNYISGWLP

SEQ ID NO: 2024 - protein, 193 aa, Zea mays
MEISSSVDCGQEKEQPTNKRPRSESTTESSTKASREKIRRDKLNERFLELGAILEPGKTPKMDKTAILSDAIRVVGELRSEAKKLKDSNENLQEKIKELKAEKNELRDEKQRLKAEKESLEQQIKFLNARPSLVPHHPVIPASAFPAPQGPAAAARHKLMMPVIGYPGFPMWQFMPPSDVDTSDDPRSCPPVA

SEQ ID NO: 2025 - protein, 628 aa, Oryza sativa
MKREYQDAGGSGGDMGSSKDKMMAAAAGAGEQEEEDVDELLAALGYKVRSSDMADVAQKLEQLEMAMGMGGVGGAGATADDGFVSHLATDTVHYNPSDLSSWVESMLSELNAPPAPLPPATPAPRLASTSSTVTSGAAAGAGYFDLPPAVDSSSSTYALKPIPSPVAAPSADPSTDSAREPKRMRTGGGSTSSSSSSSSSMDGGRTRSSVVEAAPPATQASAAANGPAVPVVVVDTQEAGIRLVHALLACAEAVQQENFSAAEALVKQIPMLASSQGGAMRKVAAYFGEALARRVYRFRPPPDSSLLDAAFADLLHAHFYESCPYLKFAHFTANQAILEAFAGCRRVHVVDFGIKQGMQWPALLQALALRPGGPPSFRLTGVGPPQPDETDALQQVGWKLAQFAHTIRVDFQYRGLVAATLADLEPFMLQPEGDDTDDEPEVIAVNSVFELHRLLAQPGALEKVLGTVRAVRPRIVTVVEQEANHNSGTFLDRFTESLHYYSTMFDSLEGAGSGQSADASPAAAGGTDQVMSEVYLGRQICNVVACEGAERTERHETLGQWRSRLGGSGFAPVHLGSNAYKQASTLLALFAGGDGYRVEEKDGCLTLGWHTRPLIATSAWRVAAAAAP

SEQ ID NO: 2026 - protein, 551 aa, Oryza sativa (japonica cultivar-group)
MCDKDPGIKLFGRVIPLAPEAEAAAAADGSDQPEAAAAAAAEVEPAAQDEDHHKETEERKYDEMKVDVPQEEEDNEMKVDAPQEKKDNEVTADVPEEKGNDEMRVDASESIESIEPVSRSTLDNKKEDQGQMNNVEEKAASDSKDENEKTANDESGQDKVLKKPDKILPCPRCNSMDTKFCYYNNYNVNQPRHFCKNCQRYWTAGGTMRNVPVGAGRRKSKSSSLHYRHLLMAPDCMMGSRVEISKSMNPEAFASAHSTPIQPIGRNETVLKFGPEVPLCESMASVLNIQEQNGTNAAAVPTGENQEDNSCISSITSHNVLPENAAQVDKNSTPVYCNGVGPVPQYYLGAPYMYPWNIGWNNVPMMVPGTSMPESASQSESCSTSSAPWMNMNSPMMPVASRLSAPPFPYPLVPPALWGCLSSWPATAWNIPWIRTNGGCMSPSSSSNSSCSGNGSPLGKHSRDSSLPLKEDKEEKSLWVPKTLRIDDPDEAAKSSIWATLGIKPGDPGIFKPFQSKGESKGQAASETRPARALKANPAALSRSQSFQETS

SEQ ID NO: 2027 - protein, 299 aa, Zea mays
MQMDSYNYNYASFFHDEAPSFYPHVAVPPSPELPIGLIASPGEPEPPFAPPMPASFQDYTGAVGVGVGVRAPFGGASVHGQAIDALGGGDGQREQSMAMAEDGEEPAPRRRQPAGGPAAAAVESSRGFRHMMRERQRREKLSQSYADLHALVAARSRGDKNSIVQAAAVYIHELRGARDQLQRRNEELKARILGHDAGQQCVKVQFEVDEPASAIDSMIGALRRLKGMDVRARGIRSSLSGRRLWTEMNVETTMAADEVERGVEEALLQEVERKQQQQLGAGSAAPGFPGPSSHVQNVF

SEQ ID NO: 2028 - protein, 196 aa, Beta vulgaris
MVGSLMAAWPVQGQTGWRKGPWTPEEDKLLIEYVNLHGEGRWSSVSRCAGLNRSGKSCRLRWVNYLRPGLKRGQITPQEEGIIIELHAIWGNKWSTIARYLPGRTDNEIKNYWRTHFKKKERTRKASEKRKSQTLKPKPLVQPQLQPQPKDEPLLHTQELISGSRNEPNNKIAPSTNNIEEQNLMAMIMASSSSSS

SEQ ID NO: 2029 - protein, 310 aa, Oryza sativa (japonica cultivar-group)
MASKAGGGGVARRGGGRMRSLGRQGSMYSLTLDEVQSQLGEPLHSMNLDELLRSVFPDGLAIADGAGATTSSQQHQPGSGLLRQGSITMPPELSKKTVDEVWKGIQAAPKRNAETGGGGGGGRRRRERQPTLGEVTLEDFLVKAGVVTQGSLKELSDVGNVDPVGRGVTATGTVDLAPGSHWIEQYKQQIASTDAHHHGQQGVQGAYFPNRLVPQPLNVGPGAILEPSYSDGQTSSGMIGGMSDSQTPGRKRGMSGDVADKLMERRQKRMIKNRESAARSRARKQAYTNELENKVSRLEEENVRLKRQKE

SEQ ID NO: 2030 - protein, 214 aa, Brassica napus
MDSEDDLLNAHDMESGEEEDDFYSGETDDYSEGGEPDYGFVEEDVDDSVMIASHRSQVNYVVLKEEDIRRHQKDDIGQVSMVLSISEVEASVLLLHYHWSVSKVHDEWFADEERVRKTVGILDAPVIVIPTPDDGGELTCGICFETFPPEEILSVACGHPFCCTCWTGYISTTINGGPGCLMLKCPEPSCPAAIGQDMFEKWLPREDKEKYYRY

SEQ ID NO: 2031 - protein, 273 aa, Avena fatua
VWAEINKEAPAHAAHAQAAQALPQPPVQPPAVNGGGIAENDRQGTLGEMTLEQFLVKAGVVRGSLGGGQAPPMPVGMVHGPMHPMQQGQHQQPGPLMYQVAPVNAMYPGMGDGMGLVPNGYTGMAVVPPPAPSQGGVGIVSPGSSDGRSAMTQADAMNCIGSGAMVMENGAARKRPAPEDRPGEKSVERRHRRMIKNRESAARSRARKQAYTVELEAELNELKEENARLKAEETTILLAKKQMLLEKMMEQSKENAKAKKGGARPRRSGSCIW

SEQ ID NO: 2032 - protein, 265 aa, Arabidopsis thaliana
  misc_feature (8)..(8): Xaa can be any naturally occurring amino acid
  misc_feature (170)..(170): Xaa can be any naturally occurring amino acid
  misc_feature (199)..(199): Xaa can be any naturally occurring amino acid
MKIQCNVXCEAAEATVLCCADEAALCWACDEKIHAANKLAGKHQRVPLSASASSIPKCDICQEASGFFFCLQDRALLCRKCDVAIHTVNPHVSAHQKFLLTGIKVGLESIDTRPSKKYSHTNDNNTKENKPLVKYKPENQKMDNDHHHKQQKKEQKEREKTGTKNNEQTXTKIPLVSSGTTTGSITQWQIEEIIGLTKXDQSYKYMENYSTYKENTSRREDYKNSTIIRSAKADGEDYINNLGGRTSWAVPQIQSPPSEYSLTWP

SEQ ID NO: 2033 - protein, 182 aa, Arabidopsis thaliana
MASRVVRTSMRLRRRDGVTQNEHQGDQQVADQAPTVPQIVATPPRINVVAIEDDDDVVESTASAFAQAKNKSRSARRGSQVVDVESAGANRSTRRRSDQTSVDSVELNKPRKSKAVAPPVEEPKFSCPICLCPFTQEVSTKCGHIFCKKCIKNALSLQAKCPTCRKKITVKDLIRVFLPTTR

SEQ ID NO: 2034 - protein, 309 aa, Zea mays
IRLEDVLYHNYYEACPYLKFAHFTANQAILEAFNGHDCVHVIDFNLMQGLQWPALIQALALRPGGPPLLRLTGVGPPSAENRDNLREIGLRLAELARSVNVRFAFRGVAAWRLEDVKPWMLQVSLNEAVAVNSIMQLHRVTAVDAAVEEVLSWIRSLNPKIVTVVEQEANHNGEGFLERFTEALHYYSTVFDSLDACPVEPDKAALAEMYLQREICNVVCCEGPARLERHEPLAKWRDRLGKAGFRPLHLGFNAYKQASMLLTLFSAEGFCVQENQGSLTLGWHSRPLIAASAWQAAPLRDDETLRFGH

SEQ ID NO: 2035 - protein, 243 aa, Antirrhinum majus
MGRGRVELKRIENKINRQVTFAKRRNGLLKKAYELSVLCDAEVALIIFSNRGKLYEFCSNSGTMLKTLERYQKCNYGAPEANVSTREALELSSQQEYLKLKARYEALQRSQRNLLGEDLGPLNSKELESLERQLDMSLKQIRSTRTQAMLDTLTDLQRKEHALNEANRSLKHRLMEGSQISLQWNPNAHDMGYGRQAAAQPQGDGFFHPLECEPTLQMGFQSEITVGAAGPSVNNYNMTGWLP

SEQ ID NO: 2036 - protein, 398 aa, Oryza sativa
  misc_feature (355)..(355): Xaa can be any naturally occurring amino acid
MELYPGYLEDHFNIHKLSISSASPPEYMTSASTQFAAPVRMGAYDRPPPVGMWSHEQFKVDNGQATSASTIMEAEMKFENRLEEIPQVVLEEGRNVDQEASKPPDKVLRRLAQNREAARKSRLRKKAYIQQLETSRLKLAQLEQELQRARQQAVYANGSLREPNLGFTGPIDPGALGFEIKYSHWVDEQNRNTGELRNALLQGQTTDQDLELKLLVEAGLDNYNRLFEMKEEAANSDVFYIMSGMWKTPTERFFLWIGGFRPSEVLKNLRPQLEPLTDKQVVEVGGLQQTSMQVEDALSQGMDKLKQTIADSLTAADPFDSPEAYMVHMANAVEQLRSLVQFVTQADHLRQQTLXQEMHRILTTRQAARGLLALGDYFQRFRALSSLWAARPRDSGIS

SEQ ID NO: 2037 - protein, 186 aa, Zea mays
MDIVCNNKAIMLKVMDQLVQGHELATKLQKLLSQHGSGRGPAEDLVDKISASFSDTISALDSFEPIPSYLFTAVEGSQNASCTNDGKLEDSVDSRKRLGPVKGKRGCYKRKKRADSWTVESTLLEDAFSWRKYGKKEILNAKFPRSYFRCTHKYTQGCKATKQVQELELEPRMFSITYIGNHTCDT

SEQ ID NO: 2038 - protein, 647 aa, Arabidopsis thaliana
MTPATQYPCDPEGVCMRCKSMPPPEESLTCGTCVTPWHVSCLLSPPETLSATLQWLCPDCSGETNPLPVSGVAAGYGSVGSDLVAAIHSIEADETLSAEEKAKKKQQLLSGKGVVDEDDEEEKKKTSKGKKPIDVLSHFECSFCMQSLQKPVSTPCGHNACLKCFLKWMGQGHRSCGTCRSVIPESMVTNPRINLSIVSAIRLARVSEKADARTSKVVHYVDNEDRPDKAFTTERAKKTGNANASSGKIFVTIPRDHFGPIPAENDPVRNQGLLVGESWKGRLACRQWGAHFPHVSGIAGQASYGAQSVVLAGGYDDDEDHGEWFLYTGSGGRILKGNKRTNTVQAFDQVFLNFNEALRLSCKLGYPVRVVRSTKDKRSPYAPQGGLLRYDGVYRIEKCWRIVGIQGTHKMCRFLFVRCDNEPAPWTSDEHGDRPRPLPNVPELNMATDLFERKESPSWDFDEGEDRWRWMKPPPASKKAVKNVLDPEERKLLREAIKSANPNTMRARLLKEFKCQICQKVMTNPVTTPCAHNFCKACLESKFAGTALVRERGSGGRKLRSQKSVMKCPCCPTDIAEFVQNPQVNREVAEVIEKLKKQEEEENAKSLDEGQCSGTSHEEEDDEQPKKRIKLDTDAEVSATVVESDMK

SEQ ID NO: 2039 - protein, 211 aa, Glycine max
MQDPTAFQGVKPPQFPEQEQLKCPRCDSNNTKFCYYNNYNLSQPRHFCKNCRRYWTKGGALRNIPVGGGSRKTTKRSSSTLSKRSSAPSSSSAVSDPDPTRICTNPVDQDQRVLNIGGGSFSSLLASSGHFGTLLEGLNPSGSGLKMGEFVEGVSSDPGLNLDSGLNPDLQVQSNENSESFLGLQNGDSSCWNGTHGWSDLAIYTPGPSFQ

SEQ ID NO: 2040 - protein, 355 aa, Arabidopsis thaliana
MNIVSWKDANDEVAGGATTRREREVKEDQEETEVRATSGKTVIKKQPTSISSSSSSWMKSKDPRIVRVSRAFGGKDRHSKVCTLRGLRDRRVRLSVPTAIQLYDLQERLGVDQPSKAVDWLLDAAKEEIDELPPLPISPENFSIFNHHQSFLNLGQRPGQDPTQLGFKINGCVQKSTTTSREENDREKGENDVVYTNNHHVGSYGTYHNLEHHHHHHQHLSLQADYHSHQLHSLVPFPSQILVCPMTTSPTTTTIQSLFPSSSSAGSGTMETLDPRQMVSHFQMPLMGNSSSSSSQNISTLYSLLHGSSSNNGGRDIDNRMSSVQFNRTNSTTTANMSRHLGSERCTSRGSDHHM

SEQ ID NO: 2041 - protein, 461 aa, Medicago truncatula
MVRIRGGEQRKRVDEKSVDVPVLVVGTKSSPALSDAQTPKPINHVEKLSVPSVGQVAPRAPSVQKSNGSGNFNLKNKMPSPRSRKPGPKRNRNTNGTPHFPVATMPYPNGENPKHVSPAAAGQGFTPPAHAIDAKHVQPPVQEDLNAYAVNYPNGRPNIQEQGDHVNHGRHHQRPFPAKANMPMQHKSMEGRKSIQSSLLQIDLNESASAQDPSEHSMEQQQEKTGTNIDESGHAVAILNSNDNSVETLNSNENNLIQAESVPEESHAPRKGHWTEDEHKLFLKGLKKHGKGCWKDISKEFVVTKTPTQIASHAQKYFIHQNVKDIEKKEKKRKSIHDTTLNKNDTLVTVAVEQRDEIPSVELQSVIPPQGMQQTQTQQNEISPMLCLLPISSTIPSVQQQNELTPVVTAPMEQQHETPAILNNKDNENLQTQLVLLYPIGSTLPDMNKLEKMCNLLAKEL

SEQ ID NO: 2042 - protein, 395 aa, Medicago truncatula
MAQGSNDVASSLSLAEETTSTKRKQLITSSGALTSQPLPTLPFDLLPEILCRLPVKLLVQLRCLCKFFNSLISDPEFAKKHLHLSTMRHHLIVSSKNDKSRELLLFDFPISSVFSSSIGTHTQLNLPISLKTNGYGKHLAVCSCDGILCISATSVDHRYAILWNPSIRKFKILPPQEDYRWKRVLDSFYSFGYDHFIHNYKVIVIYLCIRSKTNEVCVHTLGTDKWRRIHDFPFCGIIRGSGIFVSGTVNWFAFDVPNKCCREIVSFDLEKESYKILSQPNLEKKSWNLGVLKDCLCIFSHNDIFVDVWIMKEYGNKESWTKLYNISYMGVPISHAYGNVLYNSEDNQMLVDLMREGNKRKVVLYNSKNGILNFREIEIGHLMSPNVYIESLVSP

SEQ ID NO: 2043 - protein, 249 aa, Arabidopsis lyrata subsp. petraea
MGRGRVELKRIENKINRQVTFAKRRNGLLKKAYELSVLCDAEVALIIFSNRGKLYEFCSSSNMLKTLDRYQKCSYGSIEVNNKPAKELENSYREYLKLKGRYENLQRQQRNLLGEDLGPLNSKELEQLERQLDGSLKQVRSIKTQYMLDQLSDLQNKEQMLLETNRALAMKLDDMIGVRSHHMGGGWEGGEQNVTYAHHQAQSQGLYQPLECNPTLQMGYDNPVCSEQITATTQAQAQQGNGYIPGWML

SEQ ID NO: 2044 - protein, 190 aa, Lupinus microcarpus
SSGPYPYFPSSSSSASYHPFAFFNPENSSSNNTFSHDLLSFPYNIPTTHHYHAPIPETVSNFADCAAASAVMFKNDVTGSNFGLSNFLAKKPASKKDRHSKIHTSQGLRDRRVRLSIEIARKFFDLQDMLGFDKASNTLEWLFNKSKKAMKELARSKNSSSGVVANSFSSSDSEFEVVSMINQDSIDATP

SEQ ID NO: 2045 - protein, 281 aa, Glycine max
MGNQKQKWTQDEEDALIAGVEKHGPGKWKNILKDPQFAPFLTSRSNIDLKDKWRNLSVSNGAQGSKEKSRVPKLKALPAPPAPTATPQNAAPALQNAASDVTPPDASQNDQDAKNPPRYNAMIFEALSALKDSNGSDMNAIIKFMEQKNLQVNQNFRRALSTKLRRLVSQGKLEKVQNGYKVKKEASLGTKSPSPKPKDVRPPQPQQQSPASVLMTNDTIKEAADTAAYRVADAESKSYLAAEAVKEAEKISLLVEHSDSMLQLAKDIYEQCSRGEIILLA

SEQ ID NO: 2046 - protein, 307 aa, Glycine max
MSSSGTIWSYDEEKAFENAIAMHWIEESSKEQWEKIASAVPSKSMEEVKQHYQVLVEDVSAIEAGHISFPNYASDETTSSNKDFHGSSKATSSDKRSNCNYGSGFSGLGLDSTTHSSGKGGLSRSSEQERRKGIPWTEEEHRLFLLGLDKFGKGDWRSISRNFVISRTPTQVASHAQKYFIRLNSMNRDRRRSSIHDITSVNNGDVASSQAPITGLHSSTISSNTMGVGQSLKHRVQGHIPPGLGMYGTPVGHPVAAPPGHMASAVGTPVMLPPGPHPHPHPHHHAHPHPPYVLPLAYPMAPPTMHQ

SEQ ID NO: 2047 - protein, 172 aa, Lupinus concinnus
SSGPYPYFSSSSSSSYHPFAFFNPENSSSNNTFSHDLLSFPYNIPTTHHYHAPTQETLSNFADCAASAAMFKNDVNGSNFGFSNFMAKKPASKKDRHSKIHTSQGLRDRRVRLSIEIARKFFDLQDMLGFDKASNTLEWLFNKSKKAMKELARSKNSSSGAVANSFSSSDSE

SEQ ID NO: 2048 - protein, 305 aa, Glycine max
MDRIKGPWSPEEDEALQKLVEKHGPRNWSLISKSIPGRSGKSCRLRWCNQLSPQVEHRAFTHEEDDTIIRAHARFGNKWATIARLLHGRTDNAIKNHWNSTLKRKCTSTMIDDDNTPPLKRSLSAGAAIPVSTGLYMNPPTPGSPSGSDVSESSVLVASSSHVFRPVPRTGAVLPPVETTTTLSSNDPPTSLSLSLPGVDSSEVSNRTTEPIHAAPPPPPQPQPQPLNTIPLLPMMTVPSVSPTGMAPFNFSAEFLAVMQEMIRKEVRSYMELHNQKNGMCFQAAVNDGFRNASVKRIGISRVDS

SEQ ID NO: 2049 - protein, 241 aa, Brassica napus
RSPVFDQLMALEALSSPRLASPVPPLFEDSSRFHGVEHWTKGKRSKRSRSDFNQQNLTEEEYLAFCLLLLARDGNRSNRQPLPPVTAAEKSSSSSYKCSVCDKSFSSYQALGGHKASHRKNSSQTQSGGGDDQSTSATTTSAVTTGSGKSHVCTICHKSFPSGQALGGHKRCHYEGNNNNTSSVSNSEGAGSTSHVSISHRGFDLNIPPIPEFSLVNGDDEVMSPMPAKKPRFDFSEKLQH

SEQ ID NO: 2050 - protein, 169 aa, Brassica napus
MEKQINIESSVTHHQDNVTTSTVAPMTSSSESWSSSKRALVQDNEAGGKRRKSNGRDGNENPTPYRGVRKRSWGKWVSEIREPKKKSRKWLGTYPTAEMAARAHDVAALAIKGNSGYLNFPELSGLLPRPVSCSPKDIQAAAAKAAETTWKEPVIHEKLVEELSHSELS

SEQ ID NO: 2051 - protein, 166 aa, Yarrowia lipolytica CLIB122
MMYKTKRRTRDLDQILRDDMNTSQSIKALHNQEYDEEKPGLAQFYCIPCARYFETEFAKQTHIRGKVHKRRLKEIREVPYTQEEANMAAGNNVARYLARNDVDKKRLDEEEVTTMLTDRGSLEEVEQAKAASSFAREQEALRIAREKEAEEEDKGVIPETKDEDMA

SEQ ID NO: 2052 - protein, 373 aa, Kluyveromyces lactis NRRL Y-1140
MSSIKFHEKSLKEVTRWIQANEDINTETSLSSSSDSSTTIPVIDHLPARIPYATDLKRNPCHFQKCLISRLATTKMLSHAVDGGDIEVMGMLVGYTSNDMIVVKDCYSLPVQGTETRVNAHMESYEYMVQYLDAFVTKEDKIVGWYHSHPGYGCWLSNIDIQTQSLNQNYQDPYLAIVVDPKKSLSGNTLDIGAFRTLPSKDNNEHVDYYPLNIQLYQNSLDVNISKLKLKFKVDPAIQNNPNEPELMKELHECVENWFHAKKVMKSTVGFNAIGSTVVNETEIGNEDFTHERSNSISSTSSLTTRHTTDVEMDDQESAQSSLDIPANVIPGMQFQEAEIKHEYELKKKKLLLLKVKQYQKLRTYRQLFNASE

SEQ ID NO: 2053 - protein, 462 aa, Arabidopsis thaliana
MPTLYKKAGCQFQLTTMSTVSSDPAHAKKSRNSRKALKQKNEIVESSPVSDKGKETKSFEKDLMEMQAMLEKMKIEKEKTEDLLKEKDEILRKKEVEQEKLKTELKKLQKMKEFKPNMTFAFSQSLAQTEEEKKGKKKKKDCAETKRPSTPYILWCKDNWNEVKKQNPEADFKETSNILGAKWKGISAEEKKPYEEKYQADKEAYLQVITKEKREREAMKLLDDEQKQKTAMELLDQYLHFVQEAEHDNKKKAKKIKDPLKPKQPISAYLIYANERRAALKGENKSVIEVAKMAGEEWKNLSEEKKAPYDQMAKKNKEIYLQEMEGYKRTKEEEAMSQKKEEEEFMKLHKQEALQLLKKKEKTDNIIKKTKETAKNKKKNENVDPNKPKKPTSSYFLFCKDARKSVLEEHPGINNSTVTAHISLKWMELGEEEKQVYNSKAAELMEAYKKEVEEYNKTKTSS

SEQ ID NO: 2054 - protein, 189 aa, Brassica napus
MTRRCSHCNHNGHNSRTCPNRGVKLFGVRLTEGSIRKSASMGNLSHYTGSGSGGHGSGSPGDVPDHVAGGDGYASEDFVAGSSSSSRERKKGTPWTEEEHRMFLLGLQKLGKGDWRGISRNYVNTRTPTQVASHAQKYFIRQSNVSRRKRRSSLFDMIPDEGEDVPMDQQEPEAEDTPVETLMQSSDSV

SEQ ID NO: 2055 - protein, 114 aa, Triticum aestivum
  misc_feature (63)..(63): Xaa can be any naturally occurring amino acid
MIDTADTPATNRFLKSRAPLKEIRKEPKFSCPVCMNELVDASSTICGHIFCQKCIQASIQAQXKCPTCRRTLTMNSFHRVYLPDDGLTWIHPFLFPLLPRGCCQPGGNIFKKQV

SEQ ID NO: 2056 - protein, 356 aa, Lotus japonicus
MKERQRWTSEEDALLCAYVKQYGPREWHLVSQRMNTTLHRDAKSCLERWKNYLKPGIKKGSLTEEEQRLVIRLQAKHGNKWKKIAAEVPGRTAKRLGKWWEVFKEKQQREKQEISKSIGPVDDSKYDHILETFAEKLVKEHPSPSYLMAASNGPFLHTDTPAATPASALLPPWLSNSSNNPATAGQPPSPSVTLSLSPSTVAGPPPPWRGLENNALAMANTAPHGTVPAFSDNMLVSELVDCCKELEEVHGALAAHKKEATWRLRRVELQLESEKANRRREKIEETEAKIKALREQQNAALERIEAEYREQLAGLRRDAETKEQKLAEQWTVKHSRLMKFMEQIGCRSRIAETNGR

SEQ ID NO: 2057 - protein, 478 aa, Yarrowia lipolytica CLIB122
MSTRRGPWSSEEDLRLLSLIDDHGPTNWVRISQILGSRTPKQCRERYHQNLKPSLNHSPISEEEGIYIEQLVAQYGKKWAEIARHLNGRSDNAVKNWWNGGANRRRRATLAAHQRRPTWDFGAHGGGPGGPPPPPPATHGVPGMHGPPPGVVGHPGGSPPDGGTTLPPMTPYHSTNPQYNRRLSLPNLAPDHVPPHLSSHTGHHGHSHSTSVSLAASHSSSYANSHAHTPEERESHHLPSLVAVGGGVGAPPPPAPGGIVFNSAYTDSAGSAFSGSGGGNGGAAPGPQGSSVGPTAGPGPGAPTGTSPVSTRSLHHLPPSRYNRRQSATTVSTGYSSSRQSSIGGLSSVSDTDDPFSFGSSLSKYSLGNSASNSRRNSHVPTATASSSSLDPGAPHPALLHSRLHQLSNANSVSSSSVNASSPSDSGSSRPPSNRGSLSGPTGPPTMNLGHRHSVTGVQIEKDKEGGGEKLKISNLLS

SEQ ID NO: 2058 - protein, 311 aa, Oryza sativa (indica cultivar-group)
MEMMVHGRRDEQYGGLGLGLGLGLSLGVAGGAADDEQPPPRRGAAPPPQQQLCGWNGGGLFSSSSSDHRGRSAMMACHDVIEMPFLRGIDVNRAPAAETTTTTARGPSCSEEDEEPGASSPNSTLSSLSGKRGAPSAATAAAAAASDDEDSGGGSRKKLRLSKDQAAVLEDTFKEHNTLNPKQKAALARQLNLKPRQVEVWFQNRRARTKLKQTEVDCELLKRCCETLTDENRRLHRELQELRALKLATAAAAPHHLYGARVPPPTTLTMCPSCERVASAATTTRNNSGAAPARPVPTRPWPPAAAQRSSA

SEQ ID NO: 2059 - protein, 239 aa, Antirrhinum majus
MEFPNQDSESLRKNGRGKIEIKRIENITNRQVTFCKRRNGLLKKAYELSVLCDAEVALVVFSSRGRLYEYANNSVRATIERYKKASADSSNSVSTSEANTQFYQQEANKLRRQIREIQTSNRQMLGEGVSNMALKDLKSTEAKVEKAISRIRSKKNELLFAEIEHMQKRELELHNANMFLRAKIAEGERAQQQMNLMPGSDYQPMTSQSYDVRNFLPMNLMEPNQQQYSRHDQTALQLV

SEQ ID NO: 2060 - protein, 155 aa, Xanthomonas campestris pv. vesicatoria str. 85-10
MSRKVAARKSRIHGNGMFALAPLRKGERIIQYKGRLRTHAEVDADDAGDVESGHTFLFTLSDDYVLDANYEGNVARWINHSCDPNCEAVIEEAEGDDRRKDKIFIEAKRDIKPGEELTYNYGITLAERHTPRLKKIWECRCGSKNCTGTMLQPKR

SEQ ID NO: 2061 - protein, 148 aa, Brassica napus
  misc_feature (8)..(8): Xaa can be any naturally occurring amino acid
  misc_feature (18)..(18): Xaa can be any naturally occurring amino acid
ELVPGCDXIQGTALVLDXIINHVQSLQRQVEMLSMRLAAVNPRIDFNLDTLLASENGSLMDGSFNGTAMQLAWPHQVTETEQSFHHRQLQLQQPPQPQQWPYDGLNQPAWGREDDQGHGNEHNSLMAVSENLMVGSASLHPNQVKMEL

SEQ ID NO: 2062 - protein, 179 aa, Triticum aestivum
MEGQRSQRWGYLKDKAIATSLAEEETENSMDGEEDDTGDEDKRKRVIERARGPNTERVPLRLCLVDRCTANLTEAKQYYRRHKVCEVHAKASSATVAGVKQRFCQQCSRFHELAEFDETKRSCRRRLAGHNERRRKISGDSYGEGSGRRGVSLTQTQERNRIDMKLPMTNSPFKRPQIR

SEQ ID NO: 2063 - protein, 325 aa, Oryza sativa
SKPSLRVEEHTILSLLLRPSRSLSTSTTPATRAPATPVAVLWDLAASRPPSTLPLYDAAVRLHLAATSFGRVRLSAAFVHPGHRLPAPSPSAAAAAVHLCRVCGRRFRARDTLLRHFDAIHAREHAKRLARIDSSRGDRRVRLAAALSLKLSKYEKAARELTAAADPCSPADDLRRARVAVELSPTLSVSLLERAHEVLDGGSVRCLMLVSARDELAPLLRLAREKGVRSVVVGGESGPARWADVGFSWAEVIAGKARKAAPSVSGKWRDRDVLKRLEWRYDDDDEEVVFEEDGDEDGIDELTRNSKGKPWWKLESDGEDSSACR

SEQ ID NO: 2064 - protein, 221 aa, Ginkgo biloba
MGRGKIEIKRIENTTNRQVTFCKRRNGLLKKAYELSVLCDAEVALIVFSSRGRLYEFANNSVKRTIDRYKKTCADNSQGGAISECNSQYWQQEAGKLRQQIDILQNANRHLMGDALTSLSVKELKQLEIRLERGISRVRSKKNEMLLEEIEIMQRREHILLAENQFLRTKIAECESSQNANMLPGPEFDALPGFDSRHFLHASIMDAHHYAQQDQTALQLG

SEQ ID NO: 2065 - protein, 241 aa, Arabidopsis thaliana
MMRAEEDNYNLNPPPWLIPMLRANYFIPCSIHAASNKSECNMFCLDCSSEAFCSYCLLNHRNHRVLQIRRSSYHNVVRVNEIQKFIDISCVQTYIINSARIVFLNERPQPRIGKGVTNTCEICCRSLLDSFRFCSLGCKLGGMKRDPSLTFSLRGKHGREYEGEWESDEATTPTKIRKTCAFNRLMSGLSISTVKCDYLSGDQPSSSSGDESGFKLSPGTPPIYNHRNSSRRKGVPHRAPF

SEQ ID NO: 2066 - protein, 436 aa, Medicago truncatula
MVIADNEISAPKSSRKRPSVEEKSVDVPVLVVGTKSWPALSHAQTPKPMNHVENVSVQKSNGSGNFNPKNKMPSPRYRKPGPKRNSNTNGTPHFPVATMPYPNGENPKPVSLAAAGQGFTPPAHVIDAKHVQPPVQGDPNAYAVNYPNGRPNIQKEESMEGRKSIQLPLLQIDLNGPASVQDPSEHSMEQQQEKTGTDIIESGGAVAILNSNDNNVATLNSDENNLIQAESGPEESHPPGRVQRKSIHWTDDEHKLFLKGLKKHGKGRWKDISKEFVVTKTPTQIASHAQKYFIHQNVKDIEKKEKKRKSIHDTTLNKNDTLVTVAVEQRDEIPSVELQSVIPPQGMQQTQTQQNEISPMLCLLPISSTIPSVQQQNELTPVVTAPMEQQHETPAILNNKDNENLQTQLVLLYPIGSTLPDMNKLEKMCNLLAKEL

SEQ ID NO: 2067 - protein, 515 aa, Pimpinella brachycarpa
MTSSLGDLLAQPNNDDFGSNWGFENQKTKSFANPSQPFSPPPVSPSSYFSFLDSPIQINNYNIVSSSGNGTMNAQSFNEENQNFSDFSFPTQSRPASSTSSSSFVPANTNSVEESLKRKQGGWNFEEAAKNNEFQRFSPEMTMNQANMLSPEMTMNQANMQSNAAVLQSNSINYAQSSQSSQTNRDQSKLDDGYNWRKYGQKQVKGSENPRSYYKCTYLNCPTKKKVETTFDGHITEIVYKGNHNHPKPQSTKRSSSQSYQNSIPTMPETSLLENGHLEPVTTPENSSLSFGEDDLFEQGSMNKQGDDDENEPDAKRWKGEYENNETMSSLGSRTVREPRIVVQTTSDIDILDDGYRWRKYGQKVVKGNPNPRSYYKCTQVGCPVRKHVERASHDLRAVITTYEGKHNHDVPAPRGSGSYAVNRPSDNTATTSAPTAIRPTTNYLNPLQNTRAQPANGQAPFTLEMLQRPRSYEFSGFGNSTNTYTINQNQQASGQFSTAKDEPDVDSFFDSFLA

SEQ ID NO: 2068 - protein, 366 aa, Oryza sativa (japonica cultivar-group)
MASNGMASSPSSFFPPNFLLHMAQQQAAPPHDPQEHHHHHHHGHHGHHHEQQQQQQHHHHLGPPPPPPPHPHNPFLPSSAQCPSLQEFRGMAPMLGKRPMSYGDGGGGGDEVNGGGEDELSDDGSQAGEKKRRLNVEQVRTLEKNFELGNKLEPERKMQLARALGLQPRQVAIWFQNRRARWKTKQLEKDYDALKRQLDAVKAENDALLNHNKKLQAEIVALKGREAASELINLNKETEASCSNRSENSSEINLDISRTPPPDAAALDTAPTAHHHHHGGGGGGGGGGGMIPFYTSIARPASGGGVDIDQLLHSSSGGAGGPKMEHHGGGGNVQAASVDTASFGNLLCGVDEPPPFWPWPDHQHFH

SEQ ID NO: 2069 - protein, 189 aa, Lupinus concinnus
SGPYPYFSSSSSSSYHPFAFFNPENSSSNNTFSHDLLSFPYNIPTTHHYHAPTQETLSNFADCAASAAMFKNDVNGSNFGFSNFMAKKPASKKDRHSKIHTSQGLRDRRVRLSIEIARKFFDLQDMLGFDKASNTLEWLFNKSKKAMKELARSKNSSSGAVANSFSSSDSEFEVVSMINQDSIECYSRR

SEQ ID NO: 2070 - protein, 221 aa, Glycine max
MEATNRSSSSTSSSSDCCSSESNPNKPDRIKGPWSAEEDRILTGLVERYGPRNWSLISRYIKGRSGKSCRLRWCNQLSPAVEHRPFSAQEDDTIIAAHAQYGNRWATIARLLPGRTDNAVKNHWNSTLKRRAKGININVNHANNEVAASSSAPSRHFDFEDDPLTALTLAPPGIANGTVAEDAVPDHRASPEGFWDMMRDVIAREVREYVSSNFSDNSGFH

SEQ ID NO: 2071 - protein, 787 aa, Zea mays
MGMLNCVDTTSGAGAKLQHQQQAPTSPTASVSESNIVAPSVSADIDANDALASLQALRFDGDIDVEIQSPDIAMWESLFAEQMGAAGGDFLMLSPRRDFMAAGSPSRRDFMVSSPKRDYMVSSSPKRDYMTSSPMRDLMASSPKREYMVSSPRRDSSSSRRSPFSPNLFSTSGGGHQHGYAAHGPTDGGVGGAGQPLYGGLANHHGKGKSQSPLHKGYINNSGNKQSTGPSSLSCSSSYGHADNDLLPSLPSMDTCFLDDYKDGGYIGYQQQMPGKQQAAPGIMVNNNGGCSTAVTTVGVAPSPSSHQLPTLSECLAMPEPAFVGGEEAAAGGLQMGVGLPSDLYYAGQFAGGGGGGLTTTSSSLQHQMAKSDHQWAAAESSLHSMLGSVIQTEADEQLLTYSTHDACRSRTAALQLVHLLLACADFVSKGDQPSALRHLHLLRRVASPLGDSMQRVASYFADALAARLSSNNPSSSSAGAGAGAGVAPYTFPPSPDTLKVYQILYQACPYIKFAHFTANQAIFEAFHGEDRVHVVDLDILQGYQWPAFLQALAARPGGPPTLRLTGVGHPAAAVRETGRHLASLAASLRVPFEFHAAVADRLERLRPAALHRRVGEALAVNAVNRLHRVPAVHLGPLLSMIRDQAPKIMTLVEQEAGHNGPYFLGRFLEALHYYSAIFDSLDATFPADSAQRMKVEQCLLAPEIRNVVACEGAERVARHERLDRWRRIMEGRGFEPVPLSPAAVAQSQVLLGLYGAGDGYRLTEDRGCLLLGWQDRATIAASRTRG

SEQ ID NO: 2072 - protein, 295 aa, Zea mays
  misc_feature (135)..(135): Xaa can be any naturally occurring amino acid
MSGAGPDLQLPPGFRFHPTDEELVMHYLCRRCAGLPIAVPIIAEIDLYKFDPWQLPRMALYGEKEWYFFSPRDRKYPNGSRPNRAAGAGYWKATGADKPVGTPKPLAIKKALVFYAGKAPKGEKTNWIMHEYRLXDVDRSARKKNSLRLDDWVLCRIYNKKGGGLEKAAAPAAGGDHKPVFATAAVSSPPEQKPFVAAAGGLPPAFPELAAYYDRPSDSMPRLHADYSSCSEQVLSPEQLACDREVQSQPKISEWERTFASDPVNPAGSMLDPVVGHAGGDPLLQDILMYWGKPF

SEQ ID NO: 2073 - protein, 552 aa, Glycine max
MGDKEKFELDRNEDPMSYSSGMHSDWRFGGANIASSSVAMVGLGNSMNVSRGDLIGSSSCSSASMVDSFGPNYWENPTCSQNLGFCDINNVHNNGGSSSTVAIRKDGFGFGRVGQDHHGTLEMGWNHANSMYENGPGMFPHTLSQFPTDSGFIERAARFSCFSGGNFSDMVNSYGIAQSMGLYGARDAIAGHGMKSVTGGQSQGGDMNVVEATKDVSPSVEHLVAAKGSPLKSDRRSEGHVIFQDEGKQSLVRNANESDRAESSDDGGGQDDSPMLEGTSGEPSSKGLNSKKRKRSGRDGDNDKANGAQELPSEGAKGNSENQQKGDQQPISTANKACGKNAKLGSQASDPPKEEYIHVRARRGQATNSHSLAERVRREKISERMKFLQDLVPGCSKVTGKAVMLDEIINYVQSLQRQVEFLSMKLATVNPRLDFNIEGLLAKDILQQRPDPSTALGFPLDMSMAFPPLHPPQPGLIHPVIPNMTNSSDILQRTIHPQLAPLNGGFKEPNQLPDVWEDELHNVVQMSFATTAPPTSQDVDGTGPASQMKVEL

SEQ ID NO: 2074 - protein, 341 aa, Lotus japonicus
MKERQRWSSEEDALLHAYVQQYGPREWNLVSQRMNTPLNRDTKSCLERWKNYLKPGIKKGSLTKEEQRLVILLQANYGNKWKKIAAEVPGRTAKRLGKWWEVYKEKQQREKIEINGIVSPISDTKYEHMLEGFAEKLVKEHTLPSFAMAASSNEAFLHTNSSAMLPSWLSNYDSTSTPPSSISVTLSLSPSTVATPRGLENNAPFVLRNVTAHNGSVPSFSDHILMSELVGFSKELEEGHRALAAHKKEAEWRLRRLELQLESEKACRRRETVEEFEANIKALQEEQTAALNRIENACREQLGGLRRDAESKEQKLAEKWTSKHLRLTRLLEQMKIQTGAP

SEQ ID NO: 2075 - protein, 187 aa, Lupinus bicolor
SSGPYPYFSSSSSPYHPFAFFNPENSSNNTFSHDLLSFPYNIQPTHHYHAPTQETLSNFADCAASAAMFKNDVSGNSNFGFSNFLAKKPASKKDRHSKIHTSQGLRDRRVRLSIEIARKFFDLQDMLGFDKASNTLEWLFNKSKKAMKELARSKNSSSGIVANSFSSSDSEFEVVSMINQDSIDATP

SEQ ID NO: 2076 - protein, 314 aa, Triticum aestivum
MMTAMVKAEPTGAAAGAEGSSGRRDAEAELNLPPGFRFHPTDDELVVHYLCRKVAGQPQPVPIIAEVDLYKFNPWDLPERALFGSREWYFFTPRDRKYPNGSRPNRSAGTGYWKATGADKPVAPRESGGRTVGIKKALVFYSGRAPRGVKTDWIMHEYRIAEADRAPGKKGSLKLDEWVLCRLYNKKNNWEKLKVEQDMAVEAGPNGEVMDALATDAMSDSFQTHDSSEIDSASGLQQHGFMDMAQQQARMVTVKEDSDWFTGLSMDDLQTCYMNMGQMVNPTTMPGQNGSGYLQPMSSPQMMRPMWQTILPPF

SEQ ID NO: 2077 - protein, 184 aa, Medicago truncatula
MEGQKAKRKRVYSVEPNKVVQAKFTKNYINYLAPALMKIKERRTSIEAKNVESVVKYEVDMAMVFSSQGFAWSNALKTKLQKDGDEGSSRINYQQNEMVPLDFSKKICSKSEANKILVEENIDGDEDEIVDDQLRCLRKLIPGGEEIICDEEMVNELESYVSCLQMQGTRENIKAGKLESRSKN

SEQ ID NO: 2078 - protein, 208 aa, Spinacia oleracea
QIKKIEDNTNRQVTYSKRRNGLFKKANELSVLCDATVSIVMISNSNKLHEFLTPGTTTTKEVYDKYQAAMGVDLWAKQYQKMQEELQKLNDINRGLQKDIRRRMGDCLEDLTYHELSSLKEEMVNSVKVIRERKAKKIENHIDTTEKKVRNCNEVHKSLLQAFDIPKDEPQYGLVDNGEYNHVLGYNDDSRILALRLQPCLMLVQDHV

SEQ ID NO: 2079 - protein, 1155 aa, Arabidopsis thaliana
MNSNSVGVFREKEIDGKPFHTYTLSSQTDTTTPSSSGETAIDGDDHLSLQQPLFLCPSLRLKADEINYSYSEILPFNISPYFPSIRGADQQVQHLLDSDSQQVHDLLHSDNSHDDDGDEICKLPVVPIYWCNSKEIEFDQFNCGACERSKIGTDYYICLTCDLMFHKECVESPLEIKHPSYPFLSLKLYTRHEQLMSCMCCKHPSNLIFYYCPTYKLSLHPDCAMKPISIFIDHPKRHPHLLTFFPKQASLLCDVCSLIKEAFPTYVCLRCIFVAHRDCIYFPYVIKICRHQHRISFTSSLPSGKWSCGVCRKKVDNNCGAYTCNKCSHYFVHTRCALREDLWDGKDLEGVPEEPEIILEPFETIADGIILHFSHGHHLKLKTSGVYNENIICQACILPIYEGNYYSCMDQCNFILHEACANASRKKDHALHSHPLTLKVVSDIQNEYFKGYFRCSACDRESCGFIYEEDQYSIDIRCASVSEPFDYQGHEHPLFQALDRKEEREAICQICRKNCATLPYKAKYKLDKHFLTFREGEEGSDQLDWCEVCEKKLEYSREGGFYACDDCCTTLHVDCLLGKEMYMLNPGHTVMAYRSNIYILPNNTMTRPFCQLHKEDRCPHKEERSEMKIEIQCMENKQPLAASCSSASEGSGCFFLKSPEIATPATVSSFPRRTSGPMRRAKGGWTPEEDETLRRAVEKYKGKRWKKIAEFFPERTEVQCLHRWQKVLNPELVKGPWTQEEDDKIVELVKKYGPAKWSVIAKSLPGRIGKQCRERWHNHLNPGIRKDAWTVEEESALMNSHRMYGNKWAEIAKVLPGRTDNAIKNHWNSSLKKKLEFYLATGNLPPPASKFIVLKDIADGDRDSKQSSATKPFKDSDSLTQTSSGNTDSNEVGRDHFDSSSALLEEVAASRRIGVNEYACSPVEYKPQLPNLEPISEEVRINSKAYFERSIQRKVENGFGTPKHGNLYYKSPLDYYFPSEADLQHMYGYECGCSPGAASPVSLMTTPCNKDSGLTATRSPESFLREAARTFPNTPSIFRKRRKVVLAAKTDAVVVVNGVVKEVDRKEESKDMRKSLLLETTDNCSDDEELGLNGNAFNLSPPYRLRAKRTAVIKSRQLEFTSEKEKQPDNEIEFTSAKEKQPDNEIKTSEEDKPV

SEQ ID NO: 2080 - protein, 75 aa, Nicotiana benthamiana
MRESATVEDGCTWRKYGQKNILNSRYPRCYFRCAHKYDQDCRATKQVQTIQENPIIYQTTYFGQHTCSSVKIPKH

SEQ ID NO: 2081 - protein, 239 aa, Oryza sativa (indica cultivar-group)
MSREEEEKLLFPSFAFPAECFPEAATSGGEQKKARQRRRRKVKPEAAAALAGESGGDEQAKKRRLSDEQARFLEMSFKKERKLETPRKVQLAAELGLDAKQVAVWFQNRRARHKSKLMEEEFAKLRSAHDAVVLQNCHLETELLKLKERLADVEEEKAKLAAVAAATTGGGGGGGGGSSSPTSSSFSTVTYHPVLAGQFGVEAAAEEADLTYMSEYAYNSYMLELAAAGYCGGVYDQFS

SEQ ID NO: 2082 - protein, 275 aa, Arabidopsis thaliana
MIKLLFTYICTYTYKLYALYHMDYACVCMYKYKGIVTLQVCLFYIKLRVFLSNFTFSSSILALKNPNNSLIKIMAILPENSSNLDLTISVPGFSSSPLSDEGSGGGRDQLRLDMNRLPSSEDGDDEEFSHDDGSAPPRKKLRLTREQSRLLEDSFRQNHTLNPKQKEVLAKHLMLRPRQIEVWFQNRRARSKLKQTEMECEYLKRWFGSLTEENHRLHREVEELRAMKVGPTTVNSASSLTMCPRCERVTPAASPSRAVVPVPAKKTFPPQERDR

SEQ ID NO: 2083 - protein, 318 aa, Oryza sativa (japonica cultivar-group)
MTRRCSHCSHNGHNSRTCPNRGVKIFGVRLTDGSIRKSASMGNLSLLSSAAGSTSGGASPADGPDAAPTAADGYASDDFVQGSSSATRDRKKGVPWTEEEHRRFLLGLQKLGKGDWRGISRNFVVSRTPTQVASHAQKYFIRQSNMTRRKRRSSLFDMVPDESMDLPPLPGGQEPETQVLNQPALPPPREEEEVDSMESDTSAVAESSSASAIMPDNLQSTYPVIVPAYFSPFLQFSVPFWQNQKDEDGPVQETHEIVKPVPVHSKSPINVDELVGMSKLSIGESNQETVSTSLSLNLVGGQNRQSAFHANPPTRAQA

SEQ ID NO: 2084 - protein, 450 aa, Arabidopsis thaliana
MSTVSSDPAHAKKSRNSRKALKQKNEIVESSPLLSPVSGKGKESKSFEKDLMEMQAMLEKMKIEKEKTEDLLKEKDEILRKKEVEQEKLKTELKKLQKMKEFKPNMTFAFSQSLAQTEEEKKGKKKKKDCAEIKRPSTPYILWCKDNWNEVKKQNPDADFKETSNILGAKWKGISAEEKKPYEEKYQADKEAYLQVITKEKREREAMKLLDDEQKQKTAMELLDQYLHFVQEGEQDNKKKAKKIKDPLKPKQPISAYLIYANERRAALKGENKSVIEVAKITGEEWKNLSEEQKAPYDKMAKKNKEIYLQEMEGYKRTKEEEAMSQKKEEEEFMKLHKQEALQLLKKKEKTDNIIKKTKETAKNKKKNENVDPNKPKKPTSSYFLFCKDARKSVLEEHPGINNSTVTAHITLKWMELGEEEKQVYNSKAAALMEAYKKEVEEYNKTKTSS

SEQ ID NO: 2085 - protein, 185 aa, Triticum aestivum
  misc_feature (150)..(150): Xaa can be any naturally occurring amino acid
MATSFQGTTTKCNACFRCHHCKGTLKLANYNSFEGVLYCRPHFDQLFKRTGSLDKSFEGTPKVVKPERNVGNENAIKVSSAFAGPREKCFGCSKTVYPIERVTVNNTMYHKRCFKCCHGGCTISPSNYIAPEGKLFCKPPPPQLIKEKGXSASLRTAPPRHPRVPGQWMMKTRSFSQSLRISRDE

SEQ ID NO: 2086 - protein, 394 aa, Solanum lycopersicum
MYEDLDTIKQQQEQARSKKRSFFPPPPPRPSCSKQKGVTSSKFGCGEIVEVQGGHIIRSIGRKDRHSKVCTAKGPRDRRVRLAAHTAIQFYDVQDRLGYDRPSKAVDWLIKKAKASIDELAELPPWKPTTTGVDHALQDDIDVGTASTIMLGQNNSASSSGENVNANTKADSSFMPHSLDSDAISDTIKSFFPMGGSGSNEGNSFQSFQQHNLMSRSQDLKLSLQSFQDPQAQFEASNFFTGFDASVWPQHQQQPVELGRLAAARGDIGGGAIAGAGSYLFNSQPAPPLLQQLFTQNQFLSQRGPLQSSYSPSIRAWIDPSAIAIATADPIHQNQNHHQAVFPMYSTSLSGIGFASELGGFSGFRIPTRIQGEIEEEHDGVSDKPSSASSDSRH

SEQ ID NO: 2087 - protein, 180 aa, Cucumis sativus
TELRLGLPGTSPDDQSNSPINRTNSNKRALPSDDQNSSESRREINSDTSKCSQENTPPTKAQVVGWPPVRSFRKNSLQAKKKEETAAGMFIKVSMDGAPFLRKVDLKIYQGYPDLLQALENMFKFSLGKFCEREGYNGSEFVPTYEDKDGDWMLVGDVPWEMFMSSCKRLRIMKRLRIMK

SEQ ID NO: 2088 - protein, 198 aa, Sanguinaria canadensis
AGIMKKARELTVLCDAEVSLIMFSSTGKFSEYISPSATTKRIYDRYQQVSGTNLWNSHYESMQNHLNKQKEINNRLRREIRQRMGEDLDDLTFEELRGLEQNLDTSLKVVRDRKYHVITTQTDTTRKKIRSLTETHHNLLREFEGRDEDPHYALANQEEDYEAVLELANGGPNIFAFRLQPSQPNLHDGYSSNDLRLA

SEQ ID NO: 2089 - protein, 197 aa, Oryza sativa
MCTKIDTYKKRQRGQQQMDFELKTYHRKRQRRRGHQQTVELPDEIVREVLIWLPVKSLARFKSVCKAWLFIISESCFIREHLQCSKLKRYWNPSSFLITPHIPLKPGDFIFAAFSTDIRFYQWSLQEDTRAGATLLYRRHFPAGEFEPVLPMAHCDGLVLLPTKTKAYVFNTGTRDVLALPESNRNMRHSDIWTPSG

SEQ ID NO: 2090 - protein, 388 aa, Hordeum vulgare subsp. vulgare
MRKPVECPATKCSGGVAPGNSNVAAAAAKLRKGLWSPEEDERLVAYMLRSGQGSWSDVARNAGLQRCGKSCRLRWINYLRPDLKRGAFSPHEEDLIVNLHAILGNRWSQIAARLPGRTDNEIKNFWNSTIKKRLKMNSAASSPATTECASPPEPNLDGGSASCLDLTSQEDGSHHAMKSMWMDSSSSSSSSSSMQQGSRPSTMAPAANRGYGGLLLPLPDQVCGVAPSTHTSLPPFFQDHSSFKQVSPLRTGGYYPHGMAMEGAGGCFMGEEAVGGGGERSVVFNVPPLLEPMAVALQDQTLMASTGNSNNNHRNTNSTAEGTTLSSKNGCNINDDNTSKNNINSVVSYWEQHGQQQHMSRNVVMGEWDLEELMKDVSCLPFLDFQVE

SEQ ID NO: 2091 - protein, 194 aa, Ranunculus bulbosus
AGIMKKAQELTVLCDAKVALLMISNNTHKISEYVSPGTSFKAIYDQYEKTSGVSLWDSEYERMQRNLKKVKEDNNKLRKEIRQRQGDDLDGLSFAELRGLEQNMHSSVERVRHRKEHVIRTQTDTTNKKIKSHEETQRTLLAEYDVMDKAGSQYSFVQQDEDYDPINIGSRIYAIQMQSHQDAQDYGSYSLRLA

SEQ ID NO: 2092 - protein, 452 aa, Zea mays
MALLVKSHHQMLVSSSTSSSSPSASQQRQPPPPPPSSSCLTEQQPSPAKRKRRPPGTPDPDAEVVALSPRTLLESDRYVCEICGQGFQREQNLQMHRRRHKVPWRLVKRAPPPPAAAAGGGGGAADANNSSGTGGGAGGGAPRKRVFVCPEPSCLHHDPAHALGDLVGIKKHFRRKHGGRRQWVCARCAKGYAVQSDYKAHLKTCGTRGHSCDCGRVFSRVESFIEHQDACNSSRMRGEAVVVAVPVPVPPPSALPVIRPAVPRHPPTVAVAPPPPPELQLLPASAAASAPRTSSATTTASPSTTTTASHHQAEPHAATTTKLQLSIGPIVTAAAAAAVDCGEDESEAEELRRAVEEKAAADAARERARGEAAAAERALDEARRARQRARADLEKACALRDHAARLLGQVTCHACRHRSLAVAVVRGAAEGHAAGPAVACDSIRGGGLGAGI

SEQ ID NO: 2093 - protein, 391 aa, Hordeum vulgare subsp. vulgare
MTRSRPTTTMGGSVPDQHHQQQQHDGEVDGGQLQHGGEHVETVMPGFRFHPTEEELIEFYLRRKVDGKRFNIDLIASVDLYRYDPWDLPALASIGDKEWFFYVPRDRKYRNGDRPNRVTPSGYWKATGADRMVKVVEGNRSIGLKKTLVFYVGKAPKGLRSSWIMNEYRLPHGETERYQKEISLCRVYKRPGIDDNLHLTGTTTRSSGSRAAATRHSTAAHRTSAVATHRQQPPVFVEGAGHHSSSALKAYNAHTTQGTNAASTMTSLSAAGVTPPAMFRSTASVASLSSTNSTEEDGTSLYHHHLKGHNNPAVMQLHSSTHAALLNTNSSAMATIPIDELSRAIGSYSQASNPNQPTAPMQGPLLNFPSLEKIWDWNPLLESPKVCTSFK

SEQ ID NO: 2094 - protein, 193 aa, Ranunculus ficaria
AGIMKKAQELTVLCDAKVALLMFSSSGKVSEYVSPGTSFKSVYDQYQAINKMSLWDSEYEKMQGTLKKVKETNNNLRREIRQRQGDDLDGLSFMELRGLEQNLESSVDRVRHRKNHVIRTQTDTTNKKIKSHEETNRNFMSALEQMGKVEPQYAYVPQDEDYDANNMGSRIYAIHMQTHQNGEDYGSYGLSLA

SEQ ID NO: 2095 - protein, 118 aa, Nicotiana benthamiana
DDTPPTKSHSEPRHIVQTMSEVNIVNDGHRWRKYGQKFVQGNPNPRSYYRCSIAGCPVKKHVERASHDPKMVITTYEGQHDHNMSWFRTLSQITAAPDLSLTGVSGESRLESGENKHV

SEQ ID NO: 2096 - protein, 189 aa, Lupinus arizonicus
SSGPYPYFSSSSSSSSYYPFAFFNPENSSSNNTFSHDLLSFPYTIPTTHHYHAPTQETLSNFADCAASAAMFKNDVNGSNFGFSNFLAKKPASKKDRHSKIHTSQGLRDRRVRLSIDIARKFFDLQDMLGFDKASNTLEWLFNKSKKAMKELARSKNSSSGIVANSFSSSDSGFEVVSMINQDSIDATP

SEQ ID NO: 2097 - protein, 200 aa, Arabidopsis thaliana
MAPRQANGRSIAVSEGGGGKTMTMTTMRKEVHFRGVRKRPWGRYAAEIRDPGKKTRVWLGTFDTAEEAARAYDTAAREFRGSKAKTNFPLPGESTTVNDGGENDSYVNRTTVTTAREMTRQRFPFACHRERKVVGGYASAGFFFDPSRAASLRAELSRVCPVRFDPVNIELSIGIRETVKVEPRRELNLDLNLAPPVVDV

SEQ ID NO: 2098 - protein, 72 aa, Glycine max
CDNEPAPWTSDEIGDRPRPLPKIDELKGAVDITERKGDPSWDFDEKGSWLWKKPPPESKKSVDIPFCRLLQP

SEQ ID NO: 2099 - protein, 203 aa, Catharanthus roseus
MSEEIISVSDRFLLSLIEEHLLSDNSDDSSSELTSTEENWEEIFADFLNWSGSEIQKRGSPSSESCQSNSMAESCQEDSVVGTPPEAAAGGGCSKDWNRYKGVRRRPWGKFAAEIRDPKKKGSRIWLGTYETPEDAALAYDAAAFNMRGAKARLNFPHLIGSNISGPVRVNPRKRFPAEPSTTSSSSSSSSSENSGGRKKRRY

SEQ ID NO: 2100 - protein, 361 aa, Glycine max
MKDRQRWRAEEDALLRAYVKQYGPREWNLVSQRMNTPLNRDAKSCLERWKNYLKPGIKKGSLTEEEQRLVINLQATHGNKWKKIAAQVPGRTAKRLGKWWEVFKEKQQRETKGNSCTIDPISDSKYEHILESFAEKLVKERPSTSTSTSFVMATSNSSFLHADAPAPAPALLPSWLSNSNGTAPVRPPSPSVTLSLSPSTVAAPPPWMQPPVRGQDNASPLVLGNVAPHGAVLAFGENMVMSELVECCKELDEVHHALAGHKKEAAWRLSRVELQLESEKAGRRREKMEEIEAKIKALREEQTAALDRIEAEYREQLAGLRRDAESKEQKLAEQWAAKHLRLTKFLEQVGCRSRLTEPNGR

SEQ ID NO: 2101 - protein, 193 aa, Berberis gilgiana
TGIMKKAKELTVLCDAEVSLIMFSSTRKLSEFISPSTSVKKIFDRYQQVTGKQLWQHHYEKMQETLNKLKDVNNNLRREIRQRKGDDDLDDLNIQELRDLEQNMEKSVKAVRDRKFHVIGTQTNTSKKKIKNLQETHKFLLCELDQIELASHFESSSFGLANRSSHEFAFRLQPSTPNLQDGRGYGSYDFHLA

SEQ ID NO: 2102 - protein, 354 aa, Medicago truncatula
MEASGGVSGGVTVVGSDAPSEYHVAPRTDNQTPTTGSAVQLLAAVQAGAPPQQPPYTAVLTAAPAVTTVPEKKKRGRPRKYAADGSVTAALSPKPISSSAPLPPVIDFTAEKRAKVKPVSSVSKANFELENIDDHAPLWADVSVVNKGTKGSEAGEWVPCSVGSNFTPHIITVNAGEDVTMKVISFSQQGPRAVCILSANGVIKSVTLRQPDSSGGTLTYEGLFEILSLSGSFMPNESGGGTRSRSGGMSVSLASPDGRVVGGGVAGLLVAASPVQVVVGSFMAGNQHEQKPRNQKHDVVSTVSSPAVVPIPTLDPIPILSSVTSFRGDNWSAVPASDAKDKPATDINVSLPGG

SEQ ID NO: 2103 - protein, 232 aa, Prunus avium
MDMIYSQLSDLASMENPDTSSFSDASVTARRASLSDEEVILASSCPKRRAGRRVFKETRHPVYRGVRRRNNNKWVCELRAPNNKKARIWLGTYPTAEMAARAHDVAVLAFRGKLACLNFADSAWRLPVPASTDAAEIRRAATEAAEAFRQAEDGGVDEKESKAVVSEEKGCVGMEGSSNLFYLDEDEIFEMPRLLDDMADGIMLCPPQCLDGYMDWNDVETVDDLKLWSFSI

SEQ ID NO: 2104 - protein, 387 aa, Zea mays
  misc_feature (164)..(164): Xaa can be any naturally occurring amino acid
MPSYAHHHSSPLDDTRMDALKCNNNSAPPEETAEDADAAGALVEKDGFSVEDLLDLEEFGEPDKDGAEPEDDDAPPVPAAAEERSKDDSQPLSVVTYDLPSPPPEMVDLPSHDVEELEWVSRIMDDSLSELPPQAQPPPAVVASLAGRPPLAQQRRPFAHDGAXGAVAPPPGPLRTPTICALSTEAMIPVKAKRSKRSRGPAWWRSGAPFLSDSASSSSTTTTSSCSSSGSFSPFLRLDSSPFGGLEVGEGYYGHLLPRPPSKKSKHGAKGSKHKPKKRGRKPKHLPTNSSGAGAAASQPGPSDRRCSHCGVQKTPQWRAGPEGAKTLCNACGVRYKSGRLLPEYRPACSPTFVSSIHSNSHRKVLEMRRKKEGDMVATAAPAVASF

SEQ ID NO: 2105 - protein, 321 aa, Oryza sativa (japonica cultivar-group)
MKNSSNKRPLVADQWHPSSVCCDHRAALREIARGQSLVTQLRAIVLPALHSDERGDLAAQMLEGILDCSRKAISELQLQLSSDSPHDDDGHLDDKRRVRKIVSSSSDDDDHSSSKAAEDHNAKPLRQHKRRRFGDSVSLETPVPHYDGHQWRKYGQKHINNSKHPRSYYRCTYRQEEKCKATKTVQQREDLHHANSYNGDHPVMYTVVYYGQHTCCKGPAASADDHVVVEASQISTDSHCQSPGSSSSELQAAAHAGDSSQCSNISVTCSSSVVVEDCNKLLDMLPAADELTTDVLLFDMTAYAPLDLDINWEMDTNALWA

SEQ ID NO: 2106 - protein, 299 aa, Glycine max
MMVQKEDLGLSLSLNFPHHNTPNPQHPSLMSSSTHSSSPSGCNPQKPSWNEAFTSSDRNSDTCRGETRSFLRGIDVNRLPSAVDTEEETGVSSPNSTVSSVSGKRSEREEPNGEEHDMDRACSRGISDEEDAETARKKLRLSKDQSAILEESFKEHNTLNPKQKLALAKQLGLRPRQVEVWFQNRRARTKLKQTEVDCEVLKRCCENLTEENRRLQKEVQELRALKLSPQFYMQMTPPTTLTMCPSCERVAVPSSAVDAATRHHPMAQAQAQAQIRHRPIGPWASASPITHRPFDVFHH

SEQ ID NO: 2107 - protein, 308 aa, Glycine max
MKWESITLSSPTPCTPNSNTNWLVMEDNNSRSTKWTSEENKLFENALAVHDKDTPDRWHRVAEMIPGKTVVDVIRQYKELEVDVSNIEAGLIPVPGYSSTAISPFTLDWVNTPGYDGFKGCGKRSSSVRPIEHERKKGVPWTEDEHKLFLLGLKKYGKGDWRNISRNFVITRTPTQVASHAQKYFIRQLSGGKDKRRASIHDITTVNLTETITTSSEDTNGSSSPHVLSQQQQQNSTPTTPRTHFQWSNQSNTGVAMTLNPAHERVFMSHYGANSFGVKIEGQNLHESSYLRPQTQNMVFQMQQSSQH

SEQ ID NO: 2108 - protein, 302 aa, Pinus pinaster
MERFANDVDEHSLKETELRLGLPGVCESDTGPGQTRNGKRGFSEVMDSTKASSFNDNKWIFPSVKCQPATSAITETAEACKGSQPGLFSATPSQKIMMQGGCGAPQSWAGDNGLSRSTAPKDELHPKTPRDGPTEKTNGASQSQAATDPAMAPAPKAQVVGWPPIRSFRKNTLAANSKPNDEGSSSNALYVKVSMDGAPYLRKVDLKMYSTYHELSSALEKMFSCFNMGQCGAPGLSESKLIDLLNGSEYVPTYEDKDGDWMLVGDVPWEMFVDSCKRLRITKASEAIGLAPRAMEKSRSKN

SEQ ID NO: 2109 - protein, 299 aa, Solanum demissum
MDQQQQEMSSQTLESMLVCTKPDQDQKKPRPAEQQPQKCPRCDSANTKFCYYNNYSLTQPRYFCKSCRRYWTKGGTLRNVPVGGGCRKNKKLSSTTSAKRSSQDNISPNISNPIPSYDSSTDLSLAFARLQKQTNAHLEIDQEHDNNNMSMMYNTGNNCTSTTFLDALRGGFLENAPNHPGLFHHNMYNYANMGQLVENGEMGMSYDQDQMSIGTSTTMMTTIVKQEMCNMARSTEGHDLNNSNNNNKVLCGFPWQQMNGDHHVNNMNTNDFEYSTNKQSWNGFGGSSNWHGLINSPLM

SEQ ID NO: 2110 - protein, 329 aa, Nicotiana tabacum
MAANTQRKESDRIKGPWSPEEDELLQSLVEKHGPRNWSLISKSVPGRSGKSCRLRWCNQLSPQVEHRAFTSEEDETIIRAHAKFGNKWATIARLLSGRTDNAIKNHWNSTLKRKCCSMSEDLSFETPQQPLKRSSSVGPSTNFSSGMNPGSPSGSDLSDSSLSGFPQSLVYRPVPRTGGIFPLPPLVQPIETAPFIPDPPTSLCLSLPGSGTRETSIQTAQPTQLTQPPQSPPPPPLALPPVDKPVPPPTAVFMSQLPQTKQSYDFCVPALPKSGEKQFFTPEFLGVLQDMIRKEVRNYMSGVEHNGLCMQTDAIRNAVVKRIGISKIE

SEQ ID NO: 2111 - protein, 240 aa, Prunus avium
MDMFFSQLSDSVDQPQSSLLSDASVTTRGASCSDGDVILASSRPKKRAGRRVFKETRHPVYRGVRRRNNDKWVCEMREPNKKKSRIWLGTYPTAEMAARAHDVAALAFRGKLACINFADSAWRLPVPASMDTMDIRRAAAEAAEGFRPVEFGGVCSGSSDEKERMVVQVEEKNKKGSVNLERSRSLSLSYWDEEEVFHMPRLLHDMAEGLLLSPSQCLGGYMNLDDMGTDADVKLWSFSI

SEQ ID NO: 2112 - protein, 143 aa, Arachis hypogaea
MVRAPCCEKMGLKKGPWTAEEDQILISYIQKHGHGNWRALPKQAGLLRCGKSCRLRWINYLRPDIKRGNFTIEEEETIIKLHEMLGNRWSAIAAKLPGRTDNEIKNVWHTHLKKRLIKPNQMNSSSSDTKRVSNKSKIKRSDS

SEQ ID NO: 2113 - protein, 97 aa, Glycine max
  misc_feature (94)..(94): Xaa can be any naturally occurring amino acid
MASCSISASGSWSVKDNKAFEKALAVYDKDTPDRWYNVAHAVGGKTPEEVKRHYELLVQDVKHIESGRVPFPNYKKTTSESTDQEEKRLRNLNXNLQ

SEQ ID NO: 2114 - protein, 441 aa, Oryza sativa
MATAAVMAAVPSSSPADAAEAVVMTEAMPSLPQRQQPVFVEGRGGKLRDHAYSRKQKSLGLLCSNFVALYNRDDVESIGLDDAARRLGVERRRIYDIVNVLESVGILVRKAKNRYSWIGFGGVPMALRELKERALREKSGLAPLPVEEPSAAIMSDDEDEDKMGDADGDTESEKLSQPVDNPSDNKPGAPRCRLRSDHRKEKSLGLLTQNFVKLFLTMEVDTISLDEAAKLLLGEGHAENSMRTKVRRLYDIANVLSSLNFIDKIQQADSRKPAFRWLGSAGKPKAENGVTIAVPPPGKTISNKRAFGTELTNIDINRSRLDSTIPKKAKLTLSGGEILKNCKLSVQKQLGQGSKGGFVYGPFHPAGARKQELDNGNKGHTDNVQNWESLAASFRPQYQNQALGDLFAHYVEAWKSWYSEFAQGSSMMQQHFGMPVINQFL

SEQ ID NO: 2115 - protein, 295 aa, Oryza sativa (japonica cultivar-group)
MEAGGGKRAAPEGTNGAAKRARASESSQVGVGSKLKPCTKFFSTSGCPFGSSCHFLHNFPGGYQAAAKMTSHGGTAVAAPPGRMPLGPGAPNGPPTSSVKTRMCNKYNTAEGCKWGSKCHFAHGERELGKPMLLDNSMPHPMGSMPFEAPPMPGPDIVPPSTFGASATAKISVDASLAGGIIGKGGTNTKHISRMTGAKLAIRDNESNPNLKNIELEGTFDQIKHASAMVTELIVRISGNAPPAKNPGRGSHAGGPGSNFKTKLCENFNKGSCTFGDRCHFAHGESELRKPPAAA

SEQ ID NO: 2116 - protein, 484 aa, Glycine max
MEPNALGGGIFSNIRSGLLGVPPPLQTQQQQQQPNLQNQRNPHPLHHPQMVSYATHHDTDTHHQQQPPQQPIKHGYNFSAIKSSKSQSTLSDEDEPVFTAEDNSSGDPKRKVSPWHRMKWTDTMVRLLIMAVYYIGDEAGSEGTDKKKSSGLMQKKGKWKSVSRAMMEKGFYVSPQQCEDKFNDLNKRYKRVNDILGKGTSCRVVENQSLLDSMDLSPKMKEEVKKLLNSKHLFFREMCAYHNSCGHGNNNAPQQGESGGEVSQPQAQPHHHQQQQQQPQQRCFHSSEVGNLGGSGVEGLRMLKVGNGEEGDDDSEDDDDSEDDSDEDEDDSGEGGSRGHVGHGHEDIEDENDGRSMRKRARKVGGVSMSPQLMQQLSAEVSGVFQDVGKSAWDKKQWMRSRIMQLEEQQISYHTQAFELEKQRLKWARFSSKKEREMETAKLENERRRLENERMVLLIRQKEFELMSLQHQQQQQHQQQHSST

SEQ ID NO: 2117 - protein, 222 aa, Oryza sativa (indica cultivar-group)
MAPRNAAEAVAVAVAEGGGDGMEPRFRGVRKRPWGRYAAEIRDPARKARVWLGTFDTAEAAARAYDSAALHFRGPKAKTNFPVAFAHAHHHAPPPPLPKAAALAVVSPTSSTVESSSRDTPAAAPVAAAAKAQVPASPSLDLSLGMSAMVAAQPFLFLDPRVAVTVAVAAPVPRRPAVVSVKKEVARLDEQSDTGSSSSVVDASPAVGVGLDLNLPPPIEEA

SEQ ID NO: 2118 - protein, 259 aa, Zea mays
MLNMMTDLSCGPSSKVKEQVAAAPTGSGDRQGQGRGKIEIKRIENTTNRQVTFCKRRNGLLKKAYELSVLCDAEVALVVFSSRGRLYEYANNSVKSTIERYKKANSDSSNSGTVAEVNAQYYQQESSKLRQMIHSLQNANTRNIVGDSIHTMGLRDLKQMEGKLEKAIIKIRARKNELLYAEVDYMQKREMDLQTDNMYLRSKIAESNETGQPAMHMTMGAPPTSEYDHMAPFDSRNFLQVSMPQHYSHQLQPTTLQLG

SEQ ID NO: 2119 - protein, 215 aa, Hyacinthus orientalis
DGLRGKQFSKHNYKAADALVQQISVLAASQGGAMRKVAGFFAEALALRIYRPHPQQDCSLDSAFSDILQMHFYESCPYLKFAHFTANQAILEAFEGCRRVHVIDFGMKQGMQWPALMQALALRPGGPPLFRLTGIGPPQPDNTDALQQVGWKLAQLADQIHVEFEYRGFVANSLADLEPYLLESAPNPRNGPHEIEAVAANSIFELHTLLAREGA

SEQ ID NO: 2120 - protein, 213 aa, Candida albicans SC5314
MTCLDELAHSLESKSDTTNFKTRNSKIKTIDLYQQNELSGKHPQDQDKFYRLPAIDPIARDKKPWKEDINYFNKCYISSLALMKMCTHAQTGGSIEIMGMLVGKISGHSIIVMDTYRLPVEGTETRVNAQNEAYTYMVEYLTERQQLSNGKNEENIVGWYHSHPGYGCWLKGIDVSTQSLNQGLQDPYLAIVVDPVKTLKQGKVEIGAFRNVS

SEQ ID NO: 2121 - protein, 940 aa, Ostreococcus tauri
MPTSTSNVEIVNLLSSEETSSEGGGTLDEGGEAARGSGKRAEGRAVDVDDVVVLDKEDVNDDAPAPSEVVDELKKFGATSAELAFVSALRAFFEERGEEFAKVMVEKEVEERMRDRAREANALEANTNATNRKAACIREACLREAKTKEHARAVVRRALKTYRDELRKWERAVVRAQVAPASTSDASPSSSAREDTLTLPFWRHDRALVDVPSKTVSVKTQVAVQPFSSHHRNRRSWKMRANSVKTQKVRCVNLGSSEAVPPYNYFAYSTHCNSFNEHDDNQSRLLYKDEEGEFVEDQADDIEQVKVANEFTREQEFVLGALASTFSRFVLFDHVEVNGMQRETVVKHVVEEVSSILKMEEEIVVDWLNEARTTQSTSRAWCMFLEAIEIVCKLWSPYSKFDNFESLYKLMGGVCETLAQVDTDGIFWQYFAQIVINAPTMAPLKKPVIIFDTLEEATEQLSGAFCPRCFVFDCRTHGSLQPKSRGRKHASERKLLWRERMHKKANVNENDLKCSPACWYQSSEYKYLATHGMVCVSCDPSERSPLSKDSETEDPFAKNRRKWRNVLDVEILKKAVEVLSTAGGKPTACDVTLFFGKRRTCADVGRQIHSLELISSGAIVADEDVEEGDEDVNGKNKGKKRKHRSGQTKKKNPTIANRLKRSKTDENALVTQYTPCDCEGQCDAATCSCIQKGIFCERFCNCGPNCDNEFPGCKCETTKKTCRTNTCPCFAAGRECTPDKCRRCCKTADALMLPIRQKYGFVDPAQTAKIPDYPCGNMKLQLRQKEHVCLGKSGVAGWGAHVLHGARKDDFIGEYVGELVTQDEADRRGMVYDRNNCSYLFDLNSEFCIDAQNRGNKLRFANHSVHPNVRSAVMAVNGDNRLAMFALRDIAPGEELFFDYRYKDEVAPEWHEKREKVEKDAKSAKKSKGNRNKHSAKKAY

SEQ ID NO: 2122 - protein, 123 aa, Zea mays
  misc_feature (23)..(23): Xaa can be any naturally occurring amino acid
  misc_feature (52)..(52): Xaa can be any naturally occurring amino acid
  misc_feature (69)..(69): Xaa can be any naturally occurring amino acid
  misc_feature (81)..(81): Xaa can be any naturally occurring amino acid
FKEHNTVTPNQKPALAKQLNLNXRHVEVWLQIRRTVRKLKQGKVVCEFMKRXGGTVREENRRLQQEVAXLRALKVEASHRXELIPPFTSFSMCSSCEHLSKESASHRSGGQSRDLLGPSPSVR

SEQ ID NO: 2123 - protein, 129 aa, Brassica napus
  misc_feature (125)..(125): Xaa can be any naturally occurring amino acid
MRKGRGSSAVPPALHGSVVKEPRYRGVRKRPWGRFAAEIRDPLKKSRVWLGTFDSAVEAARAYDAAARNLRGSKAKTNFPIDCSPSSPLQPLNYQNHHRNLAPNQNQMDPFMDHRLYGEGGGSFXEQQQ

SEQ ID NO: 2124 - protein, 331 aa, Zea mays
  misc_feature (187)..(187): Xaa can be any naturally occurring amino acid
  misc_feature (298)..(298): Xaa can be any naturally occurring amino acid
MGRSRGVQNSGDDDTVHRSKRRRVASGGDATDSVSAGIGGAGEGGGKKALYHCNYCNKDISGKIRIKCSKCPDFDLCVECFSVGAEVTPHRSNHPYKVMDNLSFPLICPDWNADEEILLLEGIEMYGLGNWLEVAEHVGTKSKLQCIDHYTTAYMNSPCYPLPDMSHVNGKNRKELLAMAKVQGESXKKGTSLLPGELTPKAESPFSPSRVKVEDALGEGLAGRSPSHIAVGANKKASNVGHIKDGSNVSKVEDGHVDRSVGVKKPRYSADEGPSLTELSGYNAKRHEFDPEYDNDAXEQALAEMEFKETDSETDRELKLRVLRIYLSRLD

SEQ ID NO: 2125 - protein, 292 aa, Zea mays
MGLPVTRRRERDAEAELDLPPGFRFHPTDDELVEHYLCRKAAGQRLPVPIIAEVDLYRFDPWDLPERALFGAREWYFFTPRDRKYPNGSRPNRAAGDGYWKATGADKPVAPRGARTLGIKKALVFYAGKAPRGVKTDWIMHEYRLADAGRRAKKGSLRLDDWVLCRLYNKKNEWEKMRLGKEGAAKEEAMDMSTSHSWGETRTPESEIVDNDPPFPDPPAPAMMVPKKERVDAGGSARSSDLFVDLSYDDIQGMYSGLDMLPPPGEDFYSSLFASPRVRGNQPTGAAGLGPF

SEQ ID NO: 2126 - protein, 533 aa, Oryza sativa (japonica cultivar-group)
MLSSCAPTAVPPQDASGAATEPFRSLQIATAGAAAKKKRRPAGTPDPDAEVVSLSPRTLLESDRYVCEICNQGFQRDQNLQMHRRRHKVPWKLLKREAGEAARKRVFVCPEPTCLHHDPSHALGDLVGIKKHFRRKHSGHRQWACSRCSKAYAVHSDYKAHLKTCGTRGHTCDCGRVFSRVESFIEHQDACNAGRPRAAEASSSPGRGGGVVVGAPAAASSSQQQQLFAVPASLSRTASSASPSSDLVVSPVAWPATGGGGPAMVSPRAAAPAPAGGSIAAFHHRFTDPALSPPTPCGGRRGGCHTTHSLELQLMPPRTTTTCAGGSLGGTPVATAVGYYASSSPHSPAAALPSRQPVADAMRLQLSIGFGGARDDGNNNSSSSSGEVSASATRLKEAAHEQLRLAMAEKAAADEARAQAKRQAELADQELATARRMRYQAQVELSRAHVLRDHAIRQVDATQLQITCYSCSHKFRARAAAMISSDVASYVSSVVTEGGDAEVDNDGNLHRRRLNADDGMPRGHSRTMAMDLN

SEQ ID NO: 2127 - protein, 210 aa, Phalaenopsis hybrid cultivar
MGRGKIEIKRIENSTNRQVTFSKRRNGIMKKAKEISVLCDAQVSLVIFSSLGKMFEYCSPSTTLSKMLEKYQQNSGKKLWDAKHENLSAEIDRIKKENDNMQIELRHLKGEDLNSLNPKELIPIEEALQNGLTSVRDKQMDYLKMLKKNERMLEDENKRLTYLLHQQQMAMEGSMRELDIGYHHKDREYAAQMPMTFRVQPIQPNLQGNK

SEQ ID NO: 2128 - protein, 303 aa, Oryza sativa (japonica cultivar-group)
MSGGQDLQLPPGFRFHPTDEELVMHYLCRRCAGLPIAVPIIAEIDLYKFDPWQLPRMALYGEKEWYFFSPRDRKYPNGSRPNRAAGSGYWKATGADKPVGSPKPVAIKKALVFYAGKAPKGEKTNWIMHEYRLADVDRSARKKNSLRLDDWVLCRIYNKKGGLEKPPAAAVAAAGMVSSGGGVQRKPMVGVNAAVSSPPEQKPVVAGPAFPDLAAYYDRPSDSMPRLHADSSCSEQVLSPEFACEVQSQPKISEWERTFATVGPINPAASILDPAGSGGLGGLGGGGRDPLLQEILMYWGKPF

SEQ ID NO: 2129 - protein, 285 aa, Zea mays
MAASPSPSGSGGGKAGVDRIKGPWSPEEDEALQRLVRRHGARNWSLISRSVPGRSGKSCRLRWCNQLSPRVEHRPFTPDEDDAILRAHARFGNKWATIARLLSGRTDNAIKNHWNSTLKREREREREYYADARPGPGDQRSLKRTSSDGPPGSPSGSDLSDSSHQSLPTVMPSAASTAVTSQQQLQHVYYRPVPRAGGVVLLPVAPPSPQAPPATSLSLSLSLPGLDQQPEPSPPPPPTPQAQASSPLSAEFLLMMQEMIRIEVRNYMSGSGFDARAVMGMAEID

SEQ ID NO: 2130 - protein, 325 aa, Triticum aestivum
SEGIRGDPRRAACVVAAMSSLSMVEARLPPGFRFHPRDDELVLDYLSRKLGGGGAGGAAAAVASIYGCPAMVDVDLNKIEPWDLPEIACIGGKEWYFYSLRDKKYATGQRTNRATESGYWKATGKDRAISRKGLLVGMRKTLVFYEGRAPKGKKTEWVMHEFRKEGQGDLMKLPLKEDWVLCRVFYKTRATVAKPPTGSSYNIDSAAATSLPPLVDNYIAFDHPGMSTVQNLEGYEQVPCFSNGPSSHPASSASMNIPVTAMAPMAADQEQQHMGKAIKDALSQLTRFEQGNVKREAPAQGGVFAQDGFEYLAESGFSQMWNSLN

SEQ ID NO: 2131 - protein, 187 aa, Lupinus albescens
SGPYPYFPSSSSSYHPFAFFNPENASSNNTFSHDLLSFPYNTPTTHHYHAPIPETLSNFADCAASAAMFKNDVSGSNFGFSNFLAKKPASKKDRHSKIHTSQGLRDRRVRLSIEIARKFFDLQDMLGFDKASNTLEWLFNKSKKAMKELARSKNSSSGVVANSFSSSDSECEVVSMINQDSIDATPE

SEQ ID NO: 2132 - protein, 302 aa, Malus xiaojinensis
MSSGTCSTVEPAGAGEIMLFGVRLVVDSMRKSVSLNNLSQYEHPQEAASNNGNNGTAAGKDDAAPGYASENDVVHNSGGNRERERKRGVPWTEEEHKLFLLGLQKAGKGDWRGISRNFVKTRTPTQVASHAQKYYLRRSNLNRRRRRSSLFDITTDTVAPTPMDEEQVQHQDNISQSQLHPLPPPPPSEPRDAGGFSMVPNFARTVGPAVLPVHIENPMENLALRQANPENSTSAKLVHPVALHSAPHATAISDLNLNSTTDASTLTLNLSLSMDSREPSSRHSAFETMQGFSNGDSMISVA

SEQ ID NO: 2133 - protein, 189 aa, Genista pilosa
SSGPYPYFPSSSSSYHPFPFFNPENASASNNTFPHDPLSVSYNIPTTHHHVPIPETLLANFADCAAAAAMFKNDVNGSNFGFSNFLTKKPAPKKDRHSKIHTSQGLRDRRVRLSIEIARKFFDLQDMLGFDKASNTLEWLFNKSKKAMRELAQSKNSSSGVANSFYSSDSECEVVSMINQDSIDAAPEG

SEQ ID NO: 2134 - protein, 309 aa, Gossypium hirsutum
MGRSPCCEKVGLKKGPWTPEEDQKLLAYIEQHGHGSWRALPLKAGLQRCGKSCRLRWINYLRPDIKRGKFSLQEEQTIIQLHALLGNRWSAIATHLPKRTDNEIKNYWNTHLKKRLTKMGIDPVTHKPKTDALGSTTGNPIDAANLSHMAQWESARLEAEARLVRESKLVPSNPPQSNHFTAVAPSPTPATRPQCLDVLKAWQGVVCGLFTFNMDNNNLQSPTSTLNFMENTTTLPMSSSSSVNGMFNENFGWNSSINPCESGDILKVEYGSDQIPELKERLDHPMELHEMDCSSEGTWFQELFGFNGL

SEQ ID NO: 2135 - protein, 192 aa, Oryza sativa (indica cultivar-group)
MTPVSHQLVPPALAAAFGIDLAAVGVLLPSPSVDSPVSHLFFPVDEDDDEDEEGEGEGGNDDAPAAAAAGGGGGRCGKKARMVWTPELHHRFVEAVAHLGEKGAVPKAIVRLMNVDGLTRENVASHLQKYRLYLKRTRVAATPPPSPPPPPPPPPPLPPAMYVPCFAAKPPLDAANRSDSPPSRTSDATTKQ

SEQ ID NO: 2136 - protein, 190 aa, Genista anglica
SGPYSYPYFPSSSSSYHPFPFFNPDENASGNNNIFPHDPLSVSHNIPTTHHHTPIPETLANFADCAAAAAMLKNDVNGSNFGFSNLLTKKPAPKKDRHSKIHTSQGLRDRRVRLSIEIARKFFDLQDMLGFDKASHTLEWLFNKSKKAMRELAQSKNSSSGVANSFSSSDSECEVVSIINQDSIDATPEG

SEQ ID NO: 2137 - protein, 275 aa, Glycine max
  misc_feature (252)..(252): Xaa can be any naturally occurring amino acid
GNQKQKWTQDEEDALIAGVEKHGPGKWKNILKDPQFAPFLTSRSNIDLKDKWRNLSVSNGAQGSKEKSRVPKPKAFSAPPATTATTATPQNASPAPQSASSDAAVAPDASQNDQDAKNPPRYNALIFEALSALKDSNGSDMNAIIKFMEQKNHQVNQNFKRALSTRLRRLVSQGKLEKVPNGYKVKKEASSGTKSPSPKAKDVRPPQPQRQSPASLFMTNDTLKEAADTAAYRVADAESKSYLAAEAVKEAXKISLLVEHSDSMLQLAKDIYEQC

SEQ ID NO: 2138 - protein, 247 aa, Arabidopsis lyrata subsp. petraea
MGRGRVELKRIENKINRQVTFAKRRNGLLKKAYELSVLCDAEVSLIVFSNRGKLYEFCSTSNMLKTLERYQKCSYGSIEVNNKPAKELENSYREYLKLKGRYENLQRQQRNLLGEDLGPLNSKELEQLERQLDGSLKQVRCIKTQYMLDQLSDLQGKEHILLEANRALSMKLEDMIGVRHHHIGGAWEGGDQHNVAYGHPQAHSQGLYQSLECDPTLQIGYSHPVCSEQMAVTAQGQSQPGNGYIPG

SEQ ID NO: 2139 - protein, 502 aa, Daucus carota
MADIAISGEPNFSDLVPTKKGRSRKALKPKTPSSNETNILPVPVSQASPVKKAMTESTGKENEKKKTKKKAAKEAKPQEGDFEKMFEEMQKKLEQMTLEKAKTEEMLKEREEALRRKEEELETRGREQEKLQIEIKKLGKMKEFKPTVNFPLVQAPKEKELGKKEKKKVCPEKKKPSPPYALWLKDQWTEVKKENPDAEFKEISTMLAAKWKTVTAEEKKPYEEKYQAEKEAYLKIVGAEKRENEAMKLLEEEQKQRTAMELLEQYMQFKEETENDKKKKTKKEKDPLKPKHPVSAFFLFMNERRADLVAEKKNVLEVGKITGEEWKNMTEKEKAPYEEMAKKNKNQYLQQMEVYKKKKDEEAASLQKEEEELSKIQKQEAMQLLKKKEKTENLIKKTKEERQKKQKGEKKIVDPNKPKRPASSFLLFSKEARKTISEERPGINNSTLNALISVKWKEISHEEKQLWNEKAAGAMEAYKKEMEEYNKTTAAEESSSSCSGPQ

SEQ ID NO: 2140 - protein, 320 aa, Triticum aestivum
  misc_feature (108)..(108): Xaa can be any naturally occurring amino acid
  misc_feature (180)..(180): Xaa can be any naturally occurring amino acid
  misc_feature (199)..(199): Xaa can be any naturally occurring amino acid
  misc_feature (226)..(226): Xaa can be any naturally occurring amino acid
  misc_feature (236)..(236): Xaa can be any naturally occurring amino acid
MAMAQGQGQGAATSLPPGFRFHPTDEELILHYLRNRAAAAPCPVSIIADVDIYKFDPWDLPSQAVYGDCEWYFFSPRDRKYPNGIRPNRAAGSGYWKATGTDKPIHDXATGQGVGVKKALVFYKGRPPKGTKTAWIMHEYRLAADPLTTAVNTYKPIKFRNVSMRLDDWVLCRIYKKTGXASPMVPPLSDYDHMADHDXSPAAAAPSTTPPAASTRTPAAAAAPAXHDHAAAAARXGLPTIPSFSELFDDYSLAQILDAEAEHGATHPLAVHPSLNLLLPVGDKRARSAAVVLRAVVVIAGPQRRERGETRAAPPDVASA

SEQ ID NO: 2141 - protein, 1232 aa, Chlamydomonas reinhardtii
MASDLANIFNDEEAGSDRANSITSSDLDPFLLQGDDQTWAVEDWNWDPFNMFAAPKETPNVACCQALKRRKVTEQSATSAPQQAAQQHHQHAACQPCHGASGSRAGPPAAPTAACCSMAPGVQQHAPAPAPAQQLTGPLQTALNSMMPGQQQQRVADACGVSNMCHAPGMVAPPPPMPVAAPLAATGHQAGGMGMGHMNPAMGHMGWPAMPDMSNPAAAAAAAAAAASFFPTMGAGGRGPLATMGWGAQPMALQMPSMGLPGFPGGHTQCAPALQMPAVAFPTPSSGIFHQQASMAVPPSALPSPALGCSGDTTSLQGSADNCAKPPCCSGNRATGPTCSGGRQQADSSNKAAPPPPKQPAQNTVGARGGAAAPAPGDLSDFNISDSEDDDEVARRPSAAGTQRGGVGNAAALNAAAYANLGDIVSLQDVGDDTGAMVCQVPGCGKDLTNLKEYHQRYRICDVHIKLQQVLKDGRLQRFCQQCGRFHDLTAFDGNRKSCRDQLSKHNARRRRRAQAEQAKGRAAAQEAAVAAAGAMAAAAAVGGAAGGAPAVPGFEGGDVGKLLACLMQNPTQLHALRLLLGVPTHPALPAAAPAAGLGMAAGGDTAAQPDQARTYGLARDILAGRNEFSPAFESEHRMIRLSMKLFNKTPADLPHDLRNQVTSWLASAPLAMEASIRPGCVFLTVQMLVDEAGAQQAAAPGALHGLVEHLLTRTGCPFWHMGMYTVQMGTDMLLVRDGKMAGDANVNASGAAAPAATGEGAEAAARVRGDGRFPVVRRLGPLAAVAGQPTVLKLHGLNLDAPGCSVILRWGNKHLKAHMQALSTHRAIVRLPPLPDLCGPVWVEVARGAYLSPAKQLLVARNEELVQEINKLDVKTGPLRHDTVELLLQDLALVLQHIAAQPGVAAQLQHAVIALKARRLLAMACDMGWAAVASAVLPLACARCSCASEMVAAIHSASTPSQTGAADKRGLTLLHRAVRSGSVSLLAGMLAWGDSHGYRWRVDAEGPAGITPLHLSAMLDDARIGLLLLDHCGWPAAFTHLRSDGGVTPFHLAFQMGHYQVDALMSALGGLHQVADPNNAAAINNAAAAAAAAMSPSRRSRCGNAAAMGCKPDPDEDVKPDLAALQRGGRNGGGGSGGCTELDPCENCHCTLPPLLLSIMASCTDCGRRRMCMETECNNAAQRCGDCGCGGARPTARVDSGEVCSSRQHGTIFSITALCQGCHANRTLAVA

SEQ ID NO: 2142 - protein, 374 aa, Coccidioides immitis RS
MSSDDSQHSSSSPPSSKPTTSHWPTSHFFPWATSPDIIRAHEKDAYITGTLSTQAQSIVRTLRGARFAHAHTDAIKNLTDILYLSLTTLVGNRTLGEEYCDVVQLEDDSLRFPSLARRAGYILSSILMPWTLQRILPAFRRRLRAKLERSIARKQAKSVYFSKEEQQKKRQNLVLKFQTYILEHLDSLTSLSPVYAIHLAAFYFTGAYYHISKRLWGLRYVFSKRIEESEERVGYEVLGVLMVLQIVVQGIVHVKEVVESIQEDTQSKDRHDFGSDGQPGTTLKSVCNLPSIPSLPPDTPRYDLSSDAGTALSWIPAGQQRKCTLCLEPFKDPSVSTCGHVFCWTCIRDWVREKPECPLCRQEALGSKILPLRG

SEQ ID NO: 2143 - protein, 172 aa, Brassica rapa subsp. pekinensis
MAPTAKTTAFKTNGADGGNKENRYRGVRKRPWGRYAAEIRDPTEKTRVWLGTFDTPEAAARAYDKAAFQFRGAKAKTNFPLPFFVADNESPSQSSTVESPSSIPDLNLGSISSVDSRFPSPKIQAKSGMIVFDEESGRSESDSSSVVVDLSSEKRPRVFLDLDLNLPPKPEN

SEQ ID NO: 2144 - protein, 398 aa, Oryza sativa (japonica cultivar-group)
MAKQSCCHKKKLRRGLWSPEEDEKLMNHIAKYGHGCWSSVPKLAGLERCGKSCRLRWINYLRPDLKRGTFSQEEEDLIIQLHSMLGNKYVLYSSSTHICQSLSRSVPSLTMAAATATALARWSQIAAQLPGRTDNEVKNFWNSYIKKKLRDRGIDPATHKPLAADSSATPTNTTAAAASRSTATCRAVFSDAELQIPTAAAVQQQQQAPLVGAMQLVDGIKMPLDDYWPAAAAAAAPSSSTTTFSAYHHALSMQQQAAAGCGAAAAFDMDALSHCGVVVAPSASSSSTLTSMAGLSPAAADAAEQSANVAAAAAATTTNLPWLDLGHANPIATMDHYAGVLDELRWSDYFDGAYQAATTATQGGALQGQCLYDGGGGGGKDVDDAVQFVDVHSLSNWC

SEQ ID NO: 2145 - protein, 110 aa, Lolium perenne
MGRSPCCEKMGLKRGPWTAEEDKILVAHITSFGHGNWRALPKQAGLLRCGKSCRLRWINYLRPDIKRGNFSDEEEQSIIQLHQLLGNRWSAIAARLPGRTDNEIKNYWNT

SEQ ID NO: 2146 - protein, 195 aa, Oryza sativa (indica cultivar-group)
MAALAAAAAAGDGGAALPSPMEEDKKPRLVASSLAPVAGGGGGGSSSSAAVAAGASSSSSSSSVAAAARRGAGRAGGGAPSGGGGGPRCQVERCGVDLSEAGRYNRRHKVCQTHSKEPVVLVAGLRQRFCQQCSRFHELTEFDDAKRSCRRRLAGHNERRRKSAADTAHGENCRHADQDAGRSHQGTGNPPFQIR

SEQ ID NO: 2147 - protein, 268 aa, Glycine max
MAFLPSHGFTFNTTHEEDHCHFPPTSLDAFPSLPPQHFQGGAPFMLKRSMSLSGIENKCNEVHGDDELSDDGVFQSGEKKKRLNLEQVKALEKSFDQGNKLEPERKVQLAKALGLQPRQVAIWFQNRRARWKTKQLEKEYEVLKKQFEAVKADNDVLKVRNQKLQAELQAVKSRDCCEAGIISLKKETEGSWSNGSDNNSDLNLDPSRALGLNSPISSHNIKNLLPNSLKPNSITQLLQDDGLCNMFHNIDAPQNFWPRPDQHHQRFH

SEQ ID NO: 2148 - protein, 348 aa, Brassica rapa subsp. pekinensis
MDQWFYLFPAEDSHLHHRDNALTPPSSSLMPSFSREMEMSAIVSALTHVVSGNVPPHQFVGGGEGTSNSSSSSGQKRRREVEEGGGGGKSVKAANTLTVDQYFSGGNSSSRVREASSNMSGSGPTYEYTTTTTTNTETSSLNGDQQPRRRYRGVRQRPWGKWAAEIRDPFKAARVWLGTFDNAESAARAYDEAALRFRGNKAKLNFPENVKLVRPATTQSVQQTTAVQTPTQFRNSTSTSTLLPLRPAVDSQPLIQPYNLSYSEMARHQQQFQQHNQQTMDLYDQMSFPLRFGYTGDSMMQSTSSSSSHSRPLFSPAAVQPSETGYLQDIQWSPDKTSNHNYNNSSSS

SEQ ID NO: 2149 - protein, 227 aa, Helianthus annuus
MKRDYPNQNHTLFPGSSSSTPPLLPDLTGKSKMWDEFNEQDAGDDELLAVLGYKVKSSDMVDVAQKIEHLEGVLSNDDGLSQMASDSVHQNPSDLSSWLQSMICELNPVVQVQLPGSGSIAGSLVGTSTSPGSAGVDDLQAIPGDAIYPPTKKQKSLSEDNGNKTYSPNPIVIIDSQENGIRLVHTLMACAEAVQQDDMKRAETLVKQAGYLAVSQAGAMRKVATYF

SEQ ID NO: 2150 - protein, 300 aa, Oryza sativa
MGRAPCCDKKGLKKGAWTPEEDKLLVDYIQVNGHGSWRLLPKLAGLNRCGKSCRLRWTNYLRPDIKRGPFTAEEQKSIVQLHGIVGNKWSMIAAQLPGRTDNEIKNYWNTHLKKQLRRMGLDDPPPGPAAGCPAARHMAQWETARLEAEARLSLLSSSGVAATTTITAATTTTSASSSSTTAGPVAAAATSPADVFLRLWNSSIGDSFRKLAVVAAGSSSPSRADVTKDAVKQEEEAAPAGDDSSAASNEVEAATMAVDEYQMFLDFAGEELGLFHGRYGGFSLFPPVDLLEASLETAFK

SEQ ID NO: 2151 - protein, 666 aa, Solanum demissum
MAGKNSGDNRTRTSVSIFIIAGLCCFFYLLGAWQRSGFGKGDSIAVAVTKTAGENCDILPNLNFETRHAGEAGGTDESEEVEELKPCDPQYTDYTPCQDQKRAMTFPRENMNYRERHCPPQEEKLHCLIPAPKGYVTPFPWPKSRDYVPYANAPYKSLTVEKAIQNWVQYEGNFFRFPGGGTQFPQGADKYIDQLASVVPIENGTVRTALDTGCGVASWGAYLWKRNVIAMSFAPRDSHEAQVQFALERGVPAVIGVLGTIKMPYPSKAFDMAHCSRCLIPWGAADGILMMEVDRVLRPGGYWVLSGPPINWKVNFKAWQRPKEDLEEEQRKIEEAAKLLCWEKISEKGETAIWQKRKDSASCRSAQENSAARVCKPSDPDSVWFPLEHVKKVQYVNLNCLGGRKFTKYAGQSICHNMIRYNKMEMCITPNTGNGGDESLKPFPERLYAVPPRIANGLVSGVSVAKYQEDSKKWKKHVSPYKKINKLLDTGRYRNIMDMNAGLGGFAAALHSPKFWVMNVMPTIAEKNTLGVIFERGLIETLISPGSMCFVYMLELRSILPPKCEAFSTYPRTYDLIHASGLFSLYKDKCEFEDILLEMDRILRPEGAVILRDNVDVLIKVKKIIGGMRWNFKLMDHEDGPLVPEKILVAVKQYWTLGDTNSTSSQ

SEQ ID NO: 2152 - protein, 217 aa, Oryza sativa (indica cultivar-group)
MSCGGAGQSGWLLEYGLVEEEIQGSDFIYMVDDPAAVSSVLLGFDVPRKEDGSGGQDNSASKKRFNELSAILEPGKPPRADKVSILSDAARLLSQLRAEAQKLKSSNESLQDSIKSLKAEKSELRDEKTRLKAERERLEQMLKGVGAATPAAPAPFVPHHAAAVAAAPAYHPAAFAQAGGKYVPYATNYAPPAAFWQWIPPTSLDTSKDPVMWPPVA

SEQ ID NO: 2153 - protein, 140 aa, Brassica napus
  misc_feature (29)..(33): Xaa can be any naturally occurring amino acid
  misc_feature (46)..(46): Xaa can be any naturally occurring amino acid
  misc_feature (57)..(57): Xaa can be any naturally occurring amino acid
  misc_feature (69)..(69): Xaa can be any naturally occurring amino acid
  misc_feature (95)..(95): Xaa can be any naturally occurring amino acid
  misc_feature (106)..(106): Xaa can be any naturally occurring amino acid
  misc_feature (110)..(110): Xaa can be any naturally occurring amino acid
  misc_feature (115)..(115): Xaa can be any naturally occurring amino acid
  misc_feature (119)..(119): Xaa can be any naturally occurring amino acid
  misc_feature (126)..(126): Xaa can be any naturally occurring amino acid
MESLGRQSYSRKEKSLGVLVSNFLRLYNXXXXXLIGLDDAAGKLGXERRRIYDVVNXLESIGLVARRGXNQYSWRGFGQVPPVLSLLKEEGMREXFGIIPCVTNSXMVLXDQVRXEPLXLSPDDQXNSPSPKLDSKKEKS

SEQ ID NO: 2154 - protein, 334 aa, Oryza sativa
ASAAEEEAMITMDLMGGYGRVDEQVAIQEAAAAGLRGMEHLILQLSQTGTSERSPAPAQEQQQQVDCREITDMTVSKFKKVISMLNRTGHARFRRGPVVAQSSGPAASEPAPVRSSPSAVSRPMTLDFTKAASGYGKDAGFSVSGISAASSSFLSSVTGDGSVSNGRGGGSSSLMLPPPPATSCGKPPLSSAAAAMSAGAGHKRKCHDHAHSENVAGGKYGSTGGRCHCSKRRKHRVKRTIRVPAISSKVADIPADDFSWRKYGQKPIKGSPFPRGYYKCSTLRGCPARKHVERDPTDPSMLIVTYEGEHRHSPSAAGQDHPPAPPPPLALPLA

SEQ ID NO: 2155 - protein, 343 aa, Triticum aestivum
HYRTSLYKKAGWYRSGIPGISSTHASGDAEAELNLPPGFRFHPTDDELGEHYLCRKAAGQRLPVPIIAEVDLYRFDPWALPDRALFGTREWYFFTPRDRKYPNGSRPNRAAGNGYWKATGADKPVAPRGGRTMGIKKALVFYAGKAPKGVKTDWIMHEYRLADAGRAAASKKGSLRLDDWVLCRLYNKKNEWEKMQLQQQGGEEMMVEPKAENTASDMVVTSHSHSQSQSHSHSWGEARTPESEIVDNDPSLFQQAAAFQAQSPAAAAAHQEMMATLMVPKKEAAEEAGRNDLFVDLSYDDIQSMYNGLDMMPPGDDLLYSSLFASPRLRGSQPGAGGMPAPF

SEQ ID NO: 2156 - protein, 286 aa, Zea mays
MHIREEEATPSTVTGIMSTLTSAGQQKLKEPISPGGGSASVAGSAAERNNGGRGKGKTEIKRIENTTNRQVTFCKRRNGLLKKAYELSVLCDAEVALIVFSSRGRLYEYANNSVKGTIERYKKATSDNSSAAGTIAEVTIQHYKQESARLRQQIVNLQNSNRALIGDSITTMSHKELKHLETRLDKALGKIRAKKNDVLCSEVEYMQRREMELQNDNLYLRSRVDENERAQQTANMMGAPSTSEYQQHGFTPYDPIRSFLQSNIVQQPQFYSQQEDRKDFNDQGGR

SEQ ID NO: 2157 - protein, 262 aa, Zea mays
MEAGRMDQPCMASINSQPFVADIEPVKKASGDMPAAPTGSGCFDCNICLDFAAEPVVTLCGHLYCWPCIYEWLRPGVEESTASDNGSSARRQCPVCKATLSPDTLVPLYGRGGNSKKSLDGMAILRRPMVHREAVEQQNARSNVNDQHYHQSTGDSSQHQPLMQAHHHPVPPGFDFIYPPAPVGRGLIHSTAGGVLGGMAEVVLPWVLRGQLPASLHYTSPYHVAAQNVNPRLRRHQMEIERSLHQIWFFLFVFVLLCLLLF

SEQ ID NO: 2158 - protein, 364 aa, Zea mays
  misc_feature (112)..(112): Xaa can be any naturally occurring amino acid
  misc_feature (331)..(331): Xaa can be any naturally occurring amino acid
MEPTSSASIARQTWELENNIPAAASDPDAMDAIYRYDDASQARAQQEKPWANDPHHFRRTKISALALLKMVVHARAGGTIEVMGLMQGKCEGDAIIVMDAFALPVEGTETRXVNAQADAYEYMVDYSTINKQAGRLENVVGWYHSHPGYGCWLSGIDVSTQMLNQQFTEPFLAVVIDPTRTVSAGKVEIGAFRTYPKDYKPPDEPVSEYQTIPLNKIEDFGVHCKSYYALDITYFKSSLDSHLLDLLWNKYWVNTLSSSSLLGNRDYVAGQIFDLADKLEQAEGQLAHSRFGGMIMPSQRKKEQEESPLAKVTRDSSKITAEQVHGLVSQXVIKDILFNSVHPSSKASTSAPPDSSGPEPMVEA

SEQ ID NO: 2159 - protein, 238 aa, Ceratopteris richardii
MVRRKIKIKRIENATTRQVTFSKRRGGLLKKAHDLSVLCDAEVAVIIFSSKGKLFQFANPSMETVLGRYVKASRDPEAGDNGSSTDNVEADRLTVFTEKLKMLQSNVIGDDLERLSLRDLIHLEQQVHESLGHIRAKKDELILEQIDEFKQKMADTRRTTNANTSMLDRLVDFCSSGITGSQNIVESEPGYVVGVPRTDTLRAGWIATSDQSNDGPEYVPCAKRFRITEDLNESPASE

SEQ ID NO: 2160 - protein, 63 aa, Brassica napus
  misc_feature (52)..(52): Xaa can be any naturally occurring amino acid
MLCPDSEEDGFVLVDVSSSRSHGERLVYSLHLQMGNINNHELTCEELSQRMXYLYEECGNSFR

SEQ ID NO: 2161 - protein, 303 aa, Zea mays
LGFCPPPPSIKTPAALARARHGHRTQAHRAGGRQRRGRPEARESTAGCPFGSNCHFLHNFPGGYLAVSKMTNLGGPPVPAPPGRMPMGPGGPDGPPSPALKTRLCNKYNTAEGCKWGSKCHFAHGERELGKPLQMDNSMGAPPMGPGPNGHFMPPPMPIPDMVPHSTFGASATAKISVDASLAGAIIGKSGTNTKHISRVTGAKLAIRDNEADPNHKNIELEGTFDQIKHASAMVTELIVRISGKPPPQAKNNPGRGPGSHAGGPGSNFKTKLCENFNKGSCTFGDRCHFAHGEGELRKPAAA

SEQ ID NO: 2162 - protein, 223 aa, Solanum lycopersicum
MGRGKIEIKRIENNTNRQVTFCKRRNGLLKKAYELSVLCDAEIALIVFSTRGRLYEYSNNNVKATIERYKKATAETSSAYTTQELNAQFYQQESKKLRQQIQMMQNTNRHLVGEGLSSLNVRELKQLENRLERGITRIRSKKHEAILAETEDLHKREIQLEQENAFLRSKIAENERLQELSMMPSGGEEYNAFQQYLARNMLQLNMMETALPSYDPLSPDHKR

SEQ ID NO: 2163 - protein, 253 aa, Zea mays
  misc_feature (44)..(44): Xaa can be any naturally occurring amino acid
MAAGFEALLDSTALSLALPVPVPTMTLLGLKKLNSEDYLAICLXAALAGTRGRSGLSKAAAAAAGFGRQEGGGSRKQWSCPPPAPAREEEELRFRCAVCGKAFASYQALGGHKSSHRRPPTGEQYAAALAAAQQAAGSAAGHSEETTTTSGGPHRCTICWRGFATGQALGGHKRCHYWDGSSVSVSLSATASATGTGTGSSGVTVRNFDLNLMPVPESDGMRRWVEEEEEVQSPLPIKKRRISNPSLTLATCD

SEQ ID NO: 2164 - protein, 198 aa, Brassica rapa subsp. pekinensis
MNPSQSPSPNFTFLSDENSIYSVMDNYDFSNLMFSVGEGGSNGLIQEETSSPTTIVTGESGGSGSAFTTLRKKESTSLDCKNRGSKDGETKEMGHRVAIRTRSKIDVMDDGYKWRKYGKKSVKNNTNKRNYYKCSSEGCMVKKRVERDGENAAYVITTYEGVHNHESPSHVYYSDMVFDHDNWKQHSLLQSIQTFPPC

SEQ ID NO: 2165 - protein, 227 aa, Helianthus annuus
MKRDYPNQNHTLFPGSSSSTPPLLPDLTGKSKMWDEFNEQDAGDDELLAVLGYKVKSSDMVDVAQKIEHLEGVLSNDDGLSQMASDSVHQNPSDLSSWLESMICELNPVVQVQLPGSGSIAGSLVGTSTSPGSAGVDDLQAIPGDAIYPPTKKQKSLSEDNGNKTYSPNPIVIIDSQENGIRLVHTLMACAEAVQQDDMKRAETLVKQAGYLAVSQAGAMRKVATYF

SEQ ID NO: 2166 - protein, 272 aa, Brassica napus
MLKRRHGSILKRHGSDKRRRGSSSSVELEVLPHDVIELILERLPVESLRRFRSVSKKWISTIDSPRFQSRQLNLRRQSRGHDLLFVAYYEDPPDDVAQHALGSSSSCIYRTVKFPFPNLLLCYGSCDGLVCFFCIDTPNVVVNPATRWHQSFPFSSLQCLIIDKGPPFASGDLTYELGFGKDKLSGTYKPVWLYNSSEFGLDNVTTCEVFDFSTHSWRNLVASSPYPILRFQKPVYFDGSLYWLTDCVETKVLSFDLHTETFQVICKTPFAD

SEQ ID NO: 2167 - protein, 227 aa, Helianthus annuus
MKRDYPNQNNTLFPGSSSSTPPLLPDLTGKSKMWDEFNEQDAGDDELLAVLGYKVKSSDMVDVAQKIEHLEGVLSNDDGLSQMASDSVHQNPSDLSSWLESMICELNPVVQVQLPGSGSIAGSLVGTSTSPGSAGVDDLQAIPGDAIYPPTKKQKSLSEDNGNKTYSPNPIVIIDSQENGIRLVHTLMACAEAVQQDDMKRAETLVKQAGYLAVSQAGAMRKVATYF

SEQ ID NO: 2168 - protein, 327 aa, Arabidopsis thaliana
MKIQCNVCEAAEATVLCCADEAALCWACDEKIHAANKLAGKHQRVPLSASASSIPKCDICQEASGFFFCLQDRALLCRKCDVAIHTVNPHVSAHQRFLLTGIKVGLESIDTGPSTKSSPTNDDKTMETKPFVQSIPEPQKMAFDHHHHQQQQEQQEGVIPGTKVNDQTSTKLPLVSSGSTTGSIPQWQIEEIFGLTDFDQSYEYMENNGSSKVTVFMMNLVAFGFISFGSSFSKLDSLLQADTSRRGDSDSSSMMRSAEEDGEDNNNCLGGETSWAVPQIQSPPTASGLNWPKHFHHHSVFVPDITSSTPYTGSSPNQRVGKRRRRF

SEQ ID NO: 2169 - protein, 304 aa, Solanum tuberosum
MAANQPEAYADDFLEQILAIPSYSGLPVADVGTPSETTSFTSASAVSHLNSAAAAGLQQPLFPLGLSLDNGRDDVSEAGAYAVKHERDGMNIGNLYAGLEHLQSHAVRHSVPSIHHVQPFQGPPTTSTTVTVPHPPSIRPRVRARRGQATDPHSIAERLRRERISERIKALQELVPSCNKTDRAAMLDEILDYVKFLRLQVKVLSMSRLGGASAVAQLVADIPLQSVEGDSGESRSNQHIWDKWSNVDTEREVAKLMEEDVGAAMQYLQSKSLCIMPISLAALIYPTQLPDDQSLVKPEAAAPS

SEQ ID NO: 2170 - protein, 317 aa, Silene latifolia
MKRLGGSDSLGALISMCPASDERSPRSKHMYSGRDYESMYDGMDEDGSIDEGSHIPEKKRRLSVEQVKALEKYFEVENKLEPERKVKLAQELGLQPRQVAVWFQNRRARWKTKQLERDYGVLKSNFDTLKLNYDSLLHDKDSLLNQIKMLKSKLNEKTENKICVKEEAMMCDSENNGKDIESITPQPSLDEVSDDAKLQNTQKRGVTDLKDGPSESDSSAILNEDNNNSPNASNCSSDGGIIQNEQQQLLLMSPRSPSLGFNRFSFTESRSVSDNVYQAQYVKLEEHNFFSEEACNFFSDEAAPTLHWYTPDQWTDV

SEQ ID NO: 2171 - protein, 256 aa, Arabidopsis thaliana
MEGITHPIPRTVEEVFSDFRGRRAGLIKALTNDMVKFYQTCDPEKENLCLYGLPNETWEVNLPVEEVPPELPEPALGINFARDGMQEKDWVSLVAVHSDSWLLSVAFYFGARFGFGKNERKRLFQMINELPTIFEVVSGNAKQSKDLSVNNNNSKSKPSGVKSRQSESLTKVAKMSSPPPKEEEEEEDESEDESEDDEQGAVCGACGDNYGTDEFWICCDACEKWFHGKCVKITPAKAEHIKHYKCPTCSNKRARP

SEQ ID NO: 2172 - protein, 329 aa, Triticum aestivum
MEMTVNGRDTEQHHHLGLGLGLGLSLGMSGTTSPVEPAAPQRALTAAAPSTLGRQQQQSWNGAGLFYPASSGEQPRSHADDRRLAALACHEMPSLRGIDVNRAPATGGARGSCGASEDEEPGASSPDSTLSSLSGKRGAPTRSGGGEQERAGAGSDDEDDSGTGGAGSRKKLRLSKDQSAVLEDSFKEHSTLNPKQKAALARQLGLRPRQVEVWFQNRRARTKLKQTEVDCESLKRCCETLTEENRRLQREVQELRALKLLAPPAPHLYMRAPPPTTLTMCPSCERVAPSGKPAVDESRAAMVTRAVPTGPWGPVPVMPVFLGRPAQRS

SEQ ID NO: 2173 - protein, 216 aa, Silene latifolia
MRGVASPNSTVSTVSGKRSLCERDSTSAGAADDLDLERASSRGLSDDEDGGDNSRKKLRLTKDQSAILEDSFKEHNTLNPKQKLALAKRLGLGPRQVEVWFQNRRARTKLKQTEVDCEFLKRCCEQLTEENRRLQKEVQELRTLKLSPQFYMQMTPPTTLTMCPSCERVAAPPSGPVQPKPHPSLESRSSIRPVANNPWVTAAVPIRSFDAIHPRS

SEQ ID NO: 2174 - protein, 188 aa, Oryza sativa (japonica cultivar-group)
MRKSKQPQPQPSPEIRYRGVRKRPSGRYAAEIRDPAKKTPIWLGTFDSAEVAARAYDDAARSLRGPTARTNFPLAAPSAPPPRPPAAAAAAATSSHSSTVESWNRGAPRVTASALARSAAPMEATQEEDCHSYCGSSSSVLCEDGSDDAAASRTPLPFDLNMPPPEEELDMAAVADQMGIRYDTLLRL

SEQ ID NO: 2175 - protein, 477 aa, Arabidopsis thaliana
MDFDLCVECFSVGVELNRHKNSHPYRVMDNLSFSLVTSDWNADEEILLLEAIATYGFGNWKEVADHVGSKTTTECIKHFNSAYMQSPCFPLPDLSHTIGKSKDELLAMSKDSAVKTEIPAFVRLSPKEELPVSAEIKHEASGKVNEIDPPLSALAGVKKKGNVPQAKDIIKLEAAKQQSDRSVGEKKLRLPGEKVPLVTELYGYNLKREEFEIEHDNDAEQLLADMEFKDSDTDAEREQKLQVLRIYSKRLDERKRRKEFVLERNLLYPDQYEMSLSAEERKIYKSCKVFARFQSKEEHKELIKKVIEEHQILRRIEDLQEARTAGCRTTSDANRFIEEKRKKEAEESMLLRLNHGAPGSIAGKTLKSPRGLPRNLHPFGSDSLPKVTPPRIYSGLDTWDVDGLLGADLLSETEKKMCNETRILPVHYLKMLDILTREIKKGQIKKKSDAYSFFKVEPSKVDRVYDMLVHKGIGDST

SEQ ID NO: 2176 - protein, 222 aa, Triticum aestivum
MVRGKTQMKRIENPTSRQVTFSKRRGGLLKKAFELSVLCDAEVALVVFSPRGRLYEFASSSMKNTIERYKTVTKDNMSRQTVQQDMEKIKADAEGLSKKLDALEACKSKLLGQNLEECSIEELQSLEVKIEKNLLGIRAMKTRRFEEQLSTLRQKEMTLRQDNEELYSQCQKEQHLASEAAAPPAPATLAALPAPVTLEEQGQQMVDVETDLFLGLPGTGRS

SEQ ID NO: 2177 - protein, 201 aa, Solanum lycopersicum
MARGKVQMKRIENPVHRQVTFCKRRAGLLKKAKELSVLCDAEVGLFIFSAHGKLYELATKGSMQGLIERYIKSTKGVEVAEEAKDTQPLDPKEEINMLKNEIDVLQKGLSYMYGGGAGTMTLDELHSLEKYLEIWMYHIRSAKMDIMFQEIQLLKNKGGILEAANKYLQDKIDEQYTVTNMTQNLTDFQCPLTVQNEIFQF

SEQ ID NO: 2178 - protein, 378 aa, Fagus sylvatica
MCGGAIISDFIAPTGSRRLTADYLWGDRKKPISGKRFSKPVVDLDDEFELDFQGFKDEEESDIDEEEVLVQDVKPFTFSAPPSSGSKPVKSVEFNGQAEKSAKRKRKNQYRGIRQRPWGKWAAEIRDPRKGVRVWLGTFNTAEKAARAYDAEARRIRGKKAKVNFPDETPRASPKRSVKANLQKPLAKANLNSVQPNLNQNFNFMNNSDQDYTMGLMEEKPFTNQYGYMDSIPANADVGLKPFASNNTTPYFNSDQGSNSFDCSDYGWGEQGSKTPEISSVLSATLEGDESQFVEDAMPTKKLKSDSGNAVFIENNTAKTLSEELSAFESQMNFQMPFLEGSWESNMEALFSGDTTQDGNSMDLWSFDDLPVMAGGVL

SEQ ID NO: 2179 - protein, 245 aa, Populus tomentosa
MGRGRVELKRIENKINRQVTFAKRRNGLLKKAYELSVLCDAEVALIIFSNRGKLYEFCSTSNMLKTLERYQKCSYGAEEVNKPAKELENSYREYLKVKARFEALQRTQRNLLGEDLGPLNTKDLEQLERQLESSLNQVRSTKTQYMLDQLADLQNKEHLLLEANRGLTMKLDEISARNSLRPSWEGDDQQNMSYGHQHAQSQGLFQALECNPTLQIGYNPVGSDQMSCTTHATQQVHGFIPGWML

SEQ ID NO: 2180 - protein, 215 aa, Triticum aestivum
  misc_feature (101)..(101): Xaa can be any naturally occurring amino acid
MAVDAVRDAAAMVSEEEEEGQLRCDEGWGKRRRPRRQRQRAPSEEEHLALSLLMLARGHRDRHLLPSSSPAQEHRCSVCGKGFPSYQALGGHKASHRPKPXPAGADEPAATAAASPAASSSTTSSGAGGGGRVHECSVCKKTFPTGQALGGHKRCHYEGPIGASAVASRGFDLNLPALPDIVTERERCMPAPADDYEEEVLIPLVFKKPRLMIPA

SEQ ID NO: 2181 - protein, 255 aa, Oryza sativa (japonica cultivar-group)
MILGSNQAAAAAAAAAAAEEEAAELARKHTAAVATSRQWSAQTESRIVRVSRVFGGKDRHSKVKTVKGLRDRRVRLSVPTAIQLYDLQDRLGLNQPSKVVDWLLNAARHEIDKLPPLQFPPQDHLCMGHHHHLPSAMPLMHHHGHHHHADDDKYHVAAAAAALAAEKEAAAAGGGGGGGGDDRRRRGPRRSGAHSGEVPRRWLPPVHGAEQPAGDGPHHQLVFYSSEAEQFTVDNLGSQGLSLSSARAFHDQTGS

SEQ ID NO: 2182 - protein, 314 aa, Arabidopsis thaliana
MYMYEEERNNINNNQEGLRLEMAFPQHGFMFQQLHEDNAHHLPSPTSLPSCPPHLFYGGGGNYMMNRSMSFTGVSDHYHLTQKSPTTTNNMNDQDQVGEEDNLSDDGSHMMLGEKKKRLNLEQVRALEKSFELGNKLEPERKMQLAKALGLQPRQIAIWFQNRRARWKTKQLERDYDSLKKQFDVLKSDNDSLLAHNKKLHAELVALKKHDRKESAKIKREFAEASWSNNGSTENNHNNNSSDANHVSMIKDLFPSSIRSATATTASTHIDHEIVQDQDQGFCNMFNGIDETTSASYWAWPDQQQQHHNHHQFN

SEQ ID NO: 2183 - protein, 339 aa, Zea mays
MSMSFLSMVEAELPPGFRFHPRDDELICDYLAPKLGAKPGFSGCRPPMVDVDLNKVEPWDLPVAASVGPREWYFFSLKDRKYATGQRTNRATVSGYWKATGKDRPVVAARRGALVGMRKTLVFYQGRAPKGRKTEWVMHEYRMEPAAPLLDHQPSSSNSKQDEDWVLCRVICKKKLAAGGRAGGGSSRSLVASNGGRETAPATPPPPPLPPRMDTDATLAQLQAAMHATAGALEQVPCFSSFNNNTASSRAAAAAAAAQPCYLPSMATGGSHGTTSYYLDHAMLPPELGGCFDPLHGDKKLLKAVLGQLGGDAVAPGLSLQHEMAAGAVVASSAWMNHF

SEQ ID NO: 2184 - protein, 243 aa, Arabidopsis thaliana
MIRTEEEEDYTSPPWLMPMLRGSYFVPCSIHVDSNKNECNLFCLDCAGNAFCSYCLVKHKDHRVVQIRRSSYHNVVRVNEIQKFIDIACVQTYIINSAKIVFLNERPQPRIGKGVTNTCEICCRSLLDSFRFCSLGCKLGGMRRGDLSLTFSLKGKHGREYLGGSESDEATTPTKMRKTNAFNRLMSGLSISTVRFDDYGPNGDQRSSSSGDEGGFSFSPGTPPIYNHRNSSRRKGVPHRAPF

SEQ ID NO: 2185 - protein, 112 aa, Brassica napus
MENKGKNIEQAQESCYQQWMSLQSQRVPELKQALAQRRTHEGTADAAADDNKLRELTQNIIGDFKNYAGKRADLSHRCSSNYYAPSWNTPLENALLWMGGCRPSSFFKARYA

SEQ ID NO: 2186 - protein, 222 aa, Papaver somniferum
MGRGKIEIKRIENATNRQVTYSKRRSGILKKAKELTVLCDAEVSLIMFSSTGKMTEYLSPSLNGNTKRVYDRYQQISGSSLWNSHYESLQNALNKQKEINKRLRREIRQRMGEDLDELTIDELRNLEANLEASVKVVRDRKYHVIITQTETTRKKLRNHTEQHHGLLREFEPIDEDPRFILAVEEEDYESAIELANGQNIFTFRLQPSQPNPHNGGGYLRLA

SEQ ID NO: 2187 - protein, 363 aa, Solanum demissum
MDEVMLPGFRFHPTDEELVGFYLRRKVQQKPISIELIKQLDIYKYDPWDLPKLAAVGEKEWYFYCPRDRKYRNSARPNRVTGAGFWKATGRAAKGIKTDWMMHEFRLPSITDSTAPKRFLDKHIPPNDSWAICRIFKKANSNAHRALSHSWVSPPQVLPQNNTTSHDFLTSSHFTNNSNEMSSFIHKTSSTSPIQFNDLLQNSSNNNMSSSFTTLDLPLYKTLNSMSNHNNDPITSYTFSSSCVDNMNNIDASSLLLNMSSSIFGDYSIVLPDNMEGGGVHDDTTTTTLKEANNVIINNMEHMEELQWGNVVRSNNIGVLPLMNNFPLNMAVDAWKTNLLWDSSSPCPSSEMSTSYSTNKCYT

SEQ ID NO: 2188 - protein, 230 aa, Malus x domestica
MVRKKVEMKRIENNTSRQVTFSKRRKGLLKKAYELSVLCDAEVAVIVFSQKGRIYEFSRSDMQRTINRYHKHENGSGPTNKVEVEQYVQHLKHESAIIAKKIEILEASQRKLLGNDLDSCPVEELQEISSQLERSLRSISERKAQLYTEQMEQHKARERFLLQEDAQLREECCAKPWMEFSPQEKRASASVSNEKAGASASAPINYRSQSSMSSEVDTDLLIGQPNGARC

SEQ ID NO: 2189 - protein, 427 aa, Antirrhinum majus
MGGAGGGGESSNNTTHNHTTTTTSSRLGLRNSVGGEIVEVQGGHIVRSTGRKDRHSKVCTAKGPRDRRVRLAAHTAIQFYDVQDRLGYDRPSKAVDWLIKKAKSAIDELAQLPAWDPTACSVAATNSSFKHEEEQQQMGIDMQQQQQQNDMMMSNEQQQQQGLHNNAVVSNQDSNFLPPSLDSDAIADTIKSFFPMGASNEASSTAMQFQSFTTSDLLSRTTSHSHSQDLRLSLQSFQDPIMLHHHHNQSQQHQNHHSEQPHSQSHHVLLSGTPLGFDSGWQEHQHQQAAELSRFQRFAAWNPSGESGGGGASASSYLFNSPPPQAPQPLLQQLLSHNNQFFSQRGPLQSSNTPSVRAWMDPASAMADHSHHQSNVPIYPSSISGIGFSSGVGGFPGFHIPARIQGDEEEHDGYSDKPSSASSESRH

SEQ ID NO: 2190 - protein, 341 aa, Oryza glaberrima
MDHRELWPYGLRVLVIDDDCSYLSVMEDLLLKCSYKVTTYKNVREAVPFILDNPQIVDLVISDAFFPTEDGLLILQEVTSKFGIPTVIMASSGDTNTVMKYVANGASDFLLKPVRIEELSNIWQHIFRKQMQDHKNNNMVGNLEKPGHPPSILAMARATPATTKSTATEALLAPLENEVRDDMVNYNGEITDIRDLRKSRLTWTTQLHRQFIAAVNHLGEDKAVPKKILGIMKVKHLTREQVASHLQKYRMQLKKSIPTTSKHGATLSSTALDKTQDHPSRSQYFNQDGCMEIMDYSLPRDDLSSGSECMLEEQNDYSSEGFQDFRWDSDKQEYGPCFWNF

SEQ ID NO: 2191 - protein, 245 aa, Malus x domestica
GKVELKRIENKSNRQVTFSKRRNGLLKKAFELSVLCDAEVALIIFSGRGKLYEFSSSLSMMKTLERYQRCSYSSLDANRPANETQNSYQEYLQLETRVEALQQSQRNLLGEDLATLNTKKLEELEHQLETSLNKIRSTKTQFMLDQLSDLQNREQMLVEANKALRRKLEETSVQAPQFMAWEAAGDGHNNIQQTWLPSNSEAFFHPFGGNNSTSQIGYAHLGSHNGMDVGNPGQHVNGYIPGWML

SEQ ID NO: 2192 - protein, 243 aa, Lotus japonicus
MGRGRVELKRIENKINRQVTFAKRRNGLLKKAYELSVLCDAEVALIIFSNRGKLYEFCSSSSMLKTLERYQKCNYGAPEANVSTREALELSSQQEYLKLKARYEALQRSQRNLMGEDLGPLNSKELESLERQLDSSLKQIRSTRTQFMLDQLSDLQRKEHMLSEANRSLRQRQLEGYQLNSLQLNPGVEDMGYGRHPAQTHGDAFYHSIECEPTLQIGYQPDPVSVVTAGPSMNNNYMAGWLP

SEQ ID NO: 2193 - protein, 248 aa, Malus x domestica
MGRGRVELKRIENKINRQVTFAKRRNGLLKKAYELSVLCDAEVALIIFSSRGKLYEFCSSFSMMKTLEKYQSCSYGSLEANLPANETQNSYQDYLMLKARVEVLQQSQRNLLGEDLSHLNTKELEHLEHQLETSLKQIRSRKTQFILDQLSDLQNREQMLVEANKALKRKLEETSVHAPEGMAWEAAGHGPNNIQQTRLPSHSEAFFHPLEGNNSSSQIGYTHMGSDNEMNVGNPGQYVNGYIPGWML

SEQ ID NO: 2194 - protein, 925 aa, Oryza sativa (japonica cultivar-group)
MEPKSSASAAHQGGDAPAEAPRRRGGGGKRKSGGSSFTPSKRHAKERNAAFHVPPHLLHSGPLTRAARQSPHKLAEEAAAAAAAGAGGSEAGGGKGGGDVIRLEGEEAPTEETPLVDEVFEAVRSRGAGVHVVPTFAASVYQVTPVTVFCRIYLCITPQFPMIYESCLFKLQLESKDLAELSIGEADAHQEVLKFLDHWGLINFHPFLPAGQEESKPEEAHGKSHSEEKASVLEQLFKFESVQSYMIPLPKKGEVETPAPLPSLLPDPALIEDVVSAAEPSVEYHCNSCSVDCSKKRYHCRTQADFDLCSDCYNEGKFNIGMAKTDFILMDSSEVSGASGTSWTDEETLLLLEALEIFGGKWTEIAEHVATKTKAQCMLHFLQMQIEDRFHGDEDINQNIQENTEQASAEKGAAEIPDKMEVEEKAEGKDTAGEKTPEKAEGNSVEAQTEDGNAIENKDANNSGGTDSVKSLNTDEPKKSSDADPPKSSSDAEPVVKENSVDVDTSRENASNFAIDTLKSAFEAVGYFPEHEGSFADAGNPVMALASFLAGLVEDDTATNSCRSSLKAISEVSPALQLATRHCFILEDPPSDVKDMSGNASTTSTDGDKRKDKDKTQDSIDSEVEGINKKGETVLSVEGKKSSPISPKGQDTDKKDECDEDPSVDPKHNNGKESDDPVSLDKSVSNNKKGNTMETSNPEMIEDKASSEVNPADDSSLEGKVEMKKTKDAVANATTAQEQKQSQILENGKMEGNANTAKMVKTVNFNSGPLTYDTCPAEPKSTEDVAADEENSSRVTANLTDSITRLKRAAATAISAAAVKAKLLADHEEEQVRQLAALMIDKLYRKVEAKVSFLTEVEHLVQRTREYTEKTRKKLLMERNAIIAARMGSLPSRPNQPGAAGNRLPAGYGGPIVRPPPNAMPRPSS

SEQ ID NO: 2195 - protein, 273 aa, Glycine max
MVSSSGKSREMDRVKGPWSPEEDEALRALVQAHGPRNWSVISKSIPGRSGKSCRLRWCNQLSPQVAHRPFSQEEDEAIIMAHAKFGNKWATIARLLNGRTDNAVKNHWNSTLKRKSSAVSDDDVVTHRQPLKRSNSVGPAHLNPASPSVSDLSDPGLPALSNPSPSAHYMPNLMETASSAPDPATSLSLSLPGFTVPQPVSPPPPPLPLPAETVEERGKQMFNAEFLRVMQEMIKKEVRSYMSGMEEQKNGFRMQTEAIGNAVVKRMGISNIE

SEQ ID NO: 2196 - protein, 207 aa, Malus x domestica
MGRGKIEIKRIENTTNRQVTFCKRRNGLLKKAYELSILCDAEVALIVFSTRGRLYEYSNNNSIRNTIERYKKACSDSTGSSSVTEINAQNSNRHLMGDALSTLTVKELKQVENRLERGITRIRSKKHELLLAEIEYFQKKEIELENENVYFRTKVSEVERLQQANMVSGSEMNAIQALASRHFFSQNMIEGGEATFPQQDKKNLHLG

SEQ ID NO: 2197 - protein, 352 aa, Oryza sativa
  misc_feature (199)..(199): Xaa can be any naturally occurring amino acid
EEPPIPSSSLLQPQSPFFFFFLYLLFLLLFQCCSSSSSSGGARRRARERESEESLGEMGECRGGGGGGDGLIKLFGKTIPVQPDAKDVQQHSGSSSSSTESDVQETAAVAVADPSPRSEVVDGESPPQPGGEAASHQQQQKEMKLKKPDKILPCPRCSSMDTKFCYFNNYNVNQPRHFCKHCQRYWTAGGAMRNVPVGXPAYWGCMIPPPGAWSLPWPATVQSQAISSSSPPTSATPSVSSFTLGKHPREGGDHEARDHHGNGKVWVPKTIRIDNADEVARSSIRSLFAFRGGDKADDNNDDDGTGVHKLATTVFEPKRDSKTAKHPAITSLPLLHTNPVALTRSATFQEGS

SEQ ID NO: 2198 - protein, 329 aa, Oryza sativa (indica cultivar-group)
MATDRMPDSHFMASSNGGACYQNTHGTPITMGVPNLGCLVASIGIAPSSSLMPERGLATANYNLVANFPEDAAVVPQQQQLQAASSNSNSGLIKGGWTREEDEVLRQMVQHHGDRKWAEIAKSLPGRIGKQCRERWTNHLHPDIKKGIWTEEEDRKLIRAHQTYGNRWSAIARSLPGRSENTVKNRWNATKRSLNSKRRLRKKNSEQAVPRQPSLLEEYIRSCQHPLPNETAPPASFDIGGYGTGGTIGASPTPPTVHALGGSTPLGLVMFLDLLNQATPHPPQPDLNLLNITPVVPHLNTSGYCLQLDARGNCSMASCRCNPTGSAPR

SEQ ID NO: 2199 - protein, 111 aa, Medicago truncatula
MMEVKHQDWTDTMFPEMEKMMKYGNQEKKKRLTSEQMESLESSFQEEIKLDPQRKMKLSKELGLQPRQIAIWFQNRRARWKTKQLEHLYDSLRHQFEVVSKEKQQLQDEVR

SEQ ID NO: 2200 - protein, 94 aa, Nicotiana plumbaginifolia
QWREGPLGPKTLCNACGVRYRSGRLFPEYRPAASPTFIPTLHSNSHRKVVEMRKKAIYGETSALEEPHNVIVEGPPMSPAPEFVPMSSYLFDVY

SEQ ID NO: 2201 - protein, 443 aa, Glycine max
MDISPYTTPKKLSSHSTIHSNNHNNIIADEAAALLDHNNMHRSNHSHTSTSRSSDSSEPSEDGKWAPKLLRECAKAISERDSSKTHHHLWMLNELASPYGDCDQKLASYFLQALFCRATESGERCYKTLSSVAEKNHSFDSARRLILKFQEVSPWTTFGHVASNGALLEALEGEPKLHIIDLSSTLCTQWPTLLEALATRNDETPHLKLTVVAIAGSVMKEVGQRMEKFARLMGVPFEFNVISGLSQITKEGLGVQEDEAIAVNCVGALRRVQVEERENLIRVFKSLGPKVVTVVEEEADFCSSRGDFFKCFEECLKFYTLYFEMLKESFPPTSNERLMLERECSRSIVRVLACCGTGHEFEDDHGEFDCCERRERGIQWCERLRNAFSPSGFSDDVVDDVKALLKRYQSGWSLVVTQGDEHISGIYLTWKEEPVVWASAWKP

SEQ ID NO: 2202 - protein, 244 aa, Papaver somniferum
MGRGKIEIKRIENPTNRQVTYSKRRSGIFKKAKELTILCDAQVCLIMFSNTGKVCEYVSPSTTMKEFFDRFRRVTNIDLWASQYETLQEELKKQKQINSRLKKEIRQRTGQDDLNELTFEELRSLEANLLSSVEIVRLRKFHVLGSHTETSKKRNKAMEETHKNLLRATYSQADREQEFLFYAIPADREGDHHGDYLSSSSSMRRLSISGGDCENSQITFQLQPSQPNLHHAAGGGYLYNQHYA

SEQ ID NO: 2203 - protein, 226 aa, Arabidopsis thaliana
MQMDSAQNQFNKRARLFEDPELKDAKVIYPSIPESTEPVNKGYGGSTDIQSFFKESKAEETPKVLKKRGRKKKNPNPEEVNSSTPGGDDSENRSKFYESASARKRTVTAEERERAVNAAKTFEPTNPYFRVVLRPSYLYRGCIMYLPSGFAEKYLSGISGFIKLQLGEKQWPVRCLYKAGRAKFSQGWYEFTLENNIGEGDVCVFELLRTRDFVLEVTAFRVNEYV

SEQ ID NO: 2204 - protein, 310 aa, Arabidopsis thaliana
MASNNPHDNLSDQTPSDDFFEQILGLPNFSASSAAGLSGVDGGLGGGAPPMMLQLGSGEEGSHMGGLGGSGPTGFHNQMFPLGLSLDQGKGPGFLRPEGGHGSGKRFSDDVVDNRCSSMKPVFHGQPMQQPPPSAPHQPTSIRPRVRARRGQATDPHSIAERLRRERIAERIRALQELVPTVNKTDRAAMIDEIVDYVKFLRLQVKVLSMSRLGGVGAVAPLVTDMPLSSSVEDETGEGGRTPQPAWEKWSNDGTERQVAKLMEENVGAAMQLLQSKALCMMPISLAMAIYHSQPPDTSSVVKPENNPPQ

SEQ ID NO: 2205 - protein, 213 aa, Acidovorax sp. JS42
MPRTASTAAPMPAAGRRIQTRRSGVHGKGVFAVQDIAEGEVLVEYTGEVISWQEAQDRHPHDPAQPNHTFYFHVDEDRVIDAKFGGNSSRWINHSCDPNCFADERDGRIFITALRNIRAGEELNYDYGLIIEERYTPKLKAEYPCWCGSKNCRGTLLAPKRGWAPPGLAPQPPTEKAGKAPKTRKAEEAKGSGKAGKPAKSAKPRQGRRSAQR

SEQ ID NO: 2206 - protein, 496 aa, Arabidopsis thaliana
MMDLQEETGEVKIEDQCVENKQSTPASCSSVSEGSAGSSHKSPTIASPATVSPTHRYLGRTSGPIRRAKGGWTPEEDETLRQAVDTFKGKSWKNIAKSFPDRTEVQCLHRWQKVLNPDLIKGPWTHEEDEKIVELVEKYGPAKWSIIAQSLPGRIGKQCRERWHNHLNPDINKDAWTTEEEVALMNAHRSHGNKWAEIAKVLPGRTDNAIKNHWNSSLKKKSEFYLLTGRLPPPTTTRNGVPDSVTKRSSSAQKRVFGSVAQTSSVTTDVNNLAEDGNGQINSSVPVEEVVAASRMTSLNEYARSPQLPNPEPLPENGGAANNGYHLYYTPQIDYYRASEVDTQRMYGNECGCSPSASPVSFFTPPPCRNVHSNGSTPRSPESYLREAGRTYPNTPSIFRKRRPRVVVQDNNNAKKTDEAKEVDQKVNDGKDSSEIQNNGSNAYNLSPPYRIRSKRTAVFKSRQLEFISREEEKADDETKSSEKDMLIDGDSQLLG

SEQ ID NO: 2207 - protein, 273 aa, Zea mays
  misc_feature (171)..(171): Xaa can be any naturally occurring amino acid
MKRPRGATPSLSAMPNHQEDDGYGVVGMEADVDVDVDEEMMAFGGGGGGEKKRRLSAEQVRALERSFEVENKLEPERKARLARDLGLQPRQVAVWFQNRRARWKTKQLERDYAALRRSYDALRLDHDALRRDKDALLAEIRELKAKLGDDEDAAASFTSVKAEPAASDGPXPAGVGSSEISDSSAVLNDADPPVAEAPAPAPEVQGTLLVAPAGPVAGAAAANHGGVFFHGSFLKVEEDETGLLDDDGPCGGFFAVEQPPAMAWWNEPAEHWN

SEQ ID NO: 2208 - protein, 339 aa, Triticum aestivum
  misc_feature (66)..(66): Xaa can be any naturally occurring amino acid
  misc_feature (92)..(92): Xaa can be any naturally occurring amino acid
  misc_feature (107)..(107): Xaa can be any naturally occurring amino acid
  misc_feature (207)..(207): Xaa can be any naturally occurring amino acid
  misc_feature (269)..(269): Xaa can be any naturally occurring amino acid
MDHGFDGALQLPPGFRFHPTDEELVMYYLCRKCGGLPIAAPVIAEVDLYKFEPWRLPEKAAGGGPXPRQWYFFSPRDRKYPNGSRPNRAAGXTGYWKATGADKPVGXPRPVAIKKALVFYAGKPPKGVKTNWIMHEYRLADVDRSAAARKKSNNALRLDDWVLCRIYNKKGVIERYDTADSDVAERQAGAGAGWQEPGGGASTPAGXGGAKEVELSDYGFYQQPSPPATEMLCFDRSGSADRDSNSNHSMPRLHTDSSSSERALSSPSXPDFPSDMDYAESQHAAGLAAGWPGDDWGGVIEDDGFVIDGSLIFDPPSPGAFARDAAAFGDMLTYLQKPF

SEQ ID NO: 2209 - protein, 215 aa, Arabidopsis thaliana
MALDTLNSPTSTTTTTAPPPFLRCLDETEPENLESWTKRKRTKRHRIDQPNPPPSEEEYLALCLLMLARGSSDHHSPPSDHHSLSPLSDHQKDYKCSVCGKSFPSYQALGGHKTSHRKPVSVDVNNSNGTVTNNGNISNGLVGQSGKTHNCSICFKSFPSGQALGGHKRCHYDGGNGNSNGDNSHKFDLNLPADQVSDETIGKSQLSGEETKSVL

SEQ ID NO: 2210 - protein, 348 aa, Zea mays
MASSSPSCRGSGGKSDVDRIKGPWSPEEDEALQRLVARHGARNWSLISRSIPGRSGKSCRLRWCNQLSPQVEHRPFTAEEDDTILRAHARFGNKWATIARLLSGRTDNAIKNHWNSTLKRKYYAASDAVVADADDERPLKRTSSDGHPGLCFSPGSPSGSDLSDSSNHSLPSVMPSAASAAAVTSHQQQQHVYRPVPRAGGVVMLPVAPLAPPPPPPPPQPPATSLSLSLSLPGLDGQKPEASQAVLTPAPAPPQPPLQIQQQQPAPPQMPPPQAQPSLPFQLQAAATNLTSQQPAAAPFSSEFLLLMQEMIRIEVRNYMSGSGLDPRTDGAAVHAVSKRMMGMAKIE

SEQ ID NO: 2211 - protein, 313 aa, Glycine max
MGVNEDFNKDIDDHHHEYVDDDDVPLPGFRFHPTDEELVSFYLRRKLHKKPISIELIKQIDIYKYDPWDLPKTSATAEEKEGYFFCRRGRKYRNSIRPNRVTGSGFWKATGIDKPVYSHGGEGNDCIGLKKTLVYYRGSAGKGIKTDWMMHEFRLPSNKDNTTNLPSSKNYVDVPQEAEIWTLCRIFKRNVSQRKHTPDLKQLSAKRHSIHDKNSRMSNVEFNNTNQESYINFGGHYQNEQKPVINYTNSDQRNQYHVMTHQLFAAPVAQHHQQPQQLTSPSSNFWLNSPPGNDFFTFDNWDELGSVVKFVVD

SEQ ID NO: 2212 - protein, 334 aa, Zea mays
PRARRLPCPPTPTGKGETLGRLASGVQGTLMTELWMEVLPPPYFAGQAAGGWFLPDRRAGPGAWTLEENKMFERALARVDWDAPDRWERVAAMLPGRTASDVAAHYDDLECDVGCIEAGFVPFPCYGSGGGGGASQSAGFTFDWDAGGLGFKRSCYVVGGGKRERGPDQERKKGVPWTEEEHKQFLMGLKKYGRGDWRNISRNFVTSRTPTQVASHAQKYFIRLNSGGKDKRRSSIHDITTVNLPDDDAGGTASASPPSVLTSASAPSSTGGGGPVVSEQFGVLVDSKPPAPHHHFVPHPYGNVKLEPVSSHHGGFLDDSVLMQMHCGQLQPLG

SEQ ID NO: 2213 - protein, 207 aa, Triticum aestivum
  misc_feature (39)..(39): Xaa can be any naturally occurring amino acid
  misc_feature (172)..(172): Xaa can be any naturally occurring amino acid
MATSFQGTTTKCNACDKTVYLVDKLTADNRVYHKACFRXCHHCKGTLKLANYNSFEGVLYCRPHFDQLFKRTGSLDKSFEGTPKVVKPERNVGNENATKVSSAFAGTREKCFGCSKTVYPIERVTVNNTMYHKSCFKCCHGGCTISPSNYIAHEGKLFCKHHHTQLIKEKGXSASSRTTTTRHHRVPGQWMMKTRSISQSLRISRDE

SEQ ID NO: 2214 - protein, 495 aa, Medicago truncatula
MEANAMFSTITPSGLLGVVDNIPLHQQQQQQKQQNLPNQQQQNPHQLHHSQVVSYAPQHHDTDTNQHHHHSMKHGFPPFSSSKNKQQQQSSQMSDEDEPNFPAEESSGGDPKRKISPWQRMKWTDTMVRLLIMAVYYIGDEAGSEGTDPNKKKSSGLLQKKGKWKSVSRAMMEKGFYVSPQQCEDKFNDLNKRYKRVNDILGKGTACRVVENQGLLDSMDLSPKMKDEVRKLLNSKHLFFREMCAYHNSCGHGGVATSNVQHQVEGGSGTTTPPQNQPQQQHQHQHQQQNQQHCFHSSENGVGSLGVSRGEGLRMLKIGSGYVEEEDDEDEEDESEDFSDEGEDESGEGCSKGHINDQDEEENDGKPSRKRARKGGFSFPRSSSSTQLVNQMNNEISGVFQDGGKSTWEKKQWIRNRIMQLEEQKIGYESQAFQLEKQRLKWARYSSKKEREMERAKLENERRRLENERMVLLIRKKELELMHIQQQQQQQHSST

SEQ ID NO: 2215 - protein, 230 aa, Lotus japonicus
MGRGKIEIKLIENPTNRQVTYSKRRNGIFKKAHELSVLCDAKVSLIMFSKNNKMHEYISPGLTTKRIIDQYQKTLGDIDLWRSHYEKMLENLKKLKEINNKLRRQIRHRLGEGLDMDDLSFQQLRKLEEDMVSSIGKIRERKFHVIKTRTDTCRKKVRSLEQMNGNLLLELKEKCVIHPQFVLHDEGDPESAVALANGASNLYAFCQHHTHVNLPPHHHHVHGEDDLRLA

SEQ ID NO: 2216 - protein, 246 aa, Malus x domestica
MGRGRVELKRIENKINRQVTFAKRRNGLLKKAYELSVLCDAEVALIIFSNRGKLYEFCSSSSILKTLDRYQKCSYGAVDQVNRPAKELESSYREYMKLKGRYESLQRTQRNLLGEDLGPLNTKELEQLERQLEGSLKQVRSTKTQYMLDQLSDLQNKEQLLIEANRDLTMKLDEISSRNQLRQSWEGGDQGMAYATQHHHAQSQGFFQPLDCNPTLQMGYSAVGSEQMSATTNAQQVNCFIPGWML

SEQ ID NO: 2217 - protein, 219 aa, Zea mays
MALDAALDVCSKTPSPSPPTVDSSARGGRRSKRRAGSPASDGGGGVDGNEQPEQEEYLAQCLLMLSHGLPGDGAAPPSAAAKAKAIQQQHQHGRYECSVCGKVYTSYQALGGHKTSHRKPPVVAPAPAPAPGGEAEASLSGGTAHAAAEKEKTHRCSVCKRTFQSGQALGGHKRLHYEAKAKDADAVAATAVLQNFDLNLPAEGAPPDPKRARTMLLLA

SEQ ID NO: 2218 - protein, 242 aa, Malus x domestica
RVELKRIENKINRQVTFAKRRNGLLKKAYELSVLCDAEVALIVFSNRGKLYEFCSSPSILQTVDRYQKCSYGAVDQVNIPAKELESSYREYMKLKGRCESLQRTQRNLLGEELGPLNTKELEQLERQLEASLKQVRSTKTQYMLDQLSALQNKEQLLIEANRDLTMKLDEIGSRNQLRQSWEGGDQGMAYGTQHHHAQSQGFFQPLDCNPTLQIGYPAEGSEQMGATTHAQQVNCFIPGWML

SEQ ID NO: 2219 - protein, 237 aa, Saururus chinensis
MGRGRVQLKRIENKINRQVTFSKRRTGLLKKAHEISVLCDAEVALIVFSTKGKLYDYSTNAGMARILERYERYCYAEREVAVTSPDSEGSWWLEYGKLKARIEAQQRIQRQLMGEDLDALTPKELQQLENQLESALKHVKSRKNQVIYDSMVELRRKEKLLRDENTMMEKKIQEKKKERVQQAQWEQQIQSQNSPSFLPTLNIGYHQGTATETGEKEEAHPGHNTVMLAWLLRSSNN

SEQ ID NO: 2220 - protein, 228 aa, Lotus japonicus
GRGKMEIKRIENTTNRQVTFCKRRNGLLKKAYELSVLCDAEVALIVSSSRGRLYEYANNSVRGTIDRYKKACAASSNTESVSEANTQFYQQEASKLRRQIRDIQNLNRHILGEALGNLSLKELKNLEGRLEKGLSRVRSRKHETLFADVEFMKKREIELQNHNNYLRAKIAEHERAQQQQQQQQQQQQNLMLSESLPSQSYDRNLFPANLLGSDNQYSRQDQTALQLV

SEQ ID NO: 2221 - protein, 301 aa, Asarum caudigerum
AGLSSPPRERKRVRENLIFSLAFKFARFQNFRFSFSFAGGFIFFEFSSLFFFGLQEMGRGRVQLKRIENKINRQVTFSKRRTGLLKKAHEISVLCDADVALIVFSAKGKLYEYATNSSMETILERYERYSFAERELVADPESEGGWCLEYGKLKARVDALQKSHKHIMGEDLDSLSIKELQHLEQQLDVALKHIRSRKNQVMLDTISELQRKEKMLLEQNKALQKTMREKENAMVRQAQWEQDNQPQASRPSFMLSRPLPTLHIGSNYHQTRNTETEKQGDRPHSRSNSGIPAWMLSHMND

SEQ ID NO: 2222 - protein, 234 aa, Medicago truncatula
MNMNYSSSSFSATTLTSDQELSVIVSALTNVVSGSTSTEFHLPNPAIGSSSSSSLERIVPPANIETCQECNIAGCLGCDFFPEEKKQKQKRAKKKYRGVRQRPWGKWAAEIRDPRRATRVWLGTFSTAEEAARAYDNAAIEFRGPRAKLNFPMVDDSLKQSEVVAPDLENVKDENENENENMNQEMQSETNIGFGNNMDCDFWDRLGETDFQQLMRFMDFGGDSSDSRTGNTFN

SEQ ID NO: 2223 - protein, 223 aa, Lotus japonicus
MGRGKIEIKRIENTTNRQVTFCKRRNGLLKKAYELSVLCDAEVALIVFSSRGRLYEYSNNNIRSTIERYKKACSDHSSTSTTTEINAQYYQQESAKLRQQIQMLQNSNRHLMGDALSTLTVKELKQLENRLERGITRIRSKKHEMLLAEIEYFQKREIELENENLCLRTKITDVERIQQVNMVSGQELNAIQALASRNFFNPPMIEDGTSYPQQPDKKILHLG

SEQ ID NO: 2224 - protein, 296 aa, Pisum sativum
MDSSSEQQHQQMSNQSLESMLTCSKGEQDKKAKPQPEALKCPRCDSSNTKFCYYNNYSLSQPRYFCKSCRRYWTKGGTLRNVPVGGGCRKNKRSSSSVSRRIQDQAFVNNPNPVTCFPSLSYDSNDLTLALARLQKGQLGFDHEHDFSILGNHANSNININTNTSCAVLNNHGMNHSSNNHGFFEALMGSQNNVQNLYYGYGNRDMGEVDNGNVSGEMMLPYDHEMSIATTQAVTVTTMKQEMCNVREQNESRVLLGFPWQFNNGDSNMDEIDHSGRAGWNGLTSPWHGLLNSPLM

SEQ ID NO: 2225 - protein, 134 aa, Betula pendula
MEASRAEGKRSFMEEEEDQEEEEEEEEKREMSTSSSRRASGSGGSTPPTCQVENCNADLTDAKHYHRRHKVCESHAKAPIVYVAGGQKRFCQQCSRFHDLSEFDEYKKSCRKRLAGHNERRRKSSSDFHREGSN

SEQ ID NO: 2226 - protein, 231 aa, Medicago truncatula
MNYYSPAALTSDQELSAIVAALTNVVSGSTSTAYSIPEFSPTDSTVGSSSSSLERIVPAVNIVSCRECNIAGCLGCNFFPEEKKQKQKQKRAKKKYRGVRQRPWGKWAAEIRDPRRAVRVWLGTFTTAEEAARAYDNAAIEFRGPRAKLNFPVVDESLKNVVDPEVVVPLEDIKDENMNQEIQIETTMGFESNKNCDFWDSIGEADFQQLMRFMDFDRDSSDSRTWNTFSS

SEQ ID NO: 2227 - protein, 200 aa, Craterostigma plantagineum
MPAEAPAVEDFSSDKASPRTCSDGDEELNFVNNNNDNNNSRKKLRLSKEQSAFLEEHYKLHNSLNPNQKFALAKQLNLRPRQVEVWFQNRRARTKLKQTEADCEYLKQRCESLTDDNKRLLQELKDLRGLNDDDDDDNNNNNKQFPPLAVCPSCKHITTTSAAVVVHAISAVDSREDAAVMAKSMSRSKFNFPFSPYIDN

SEQ ID NO: 2228 - protein, 83 aa, Dubautia menziesii
KRRNGIFKKAHELTVLCDAKVSLIMFSNTGKFHEYISPSTTTKKIYDMYQTTLGFDLWSSHYERMTETMKKLKDSNNKLRREI

SEQ ID NO: 2229 - protein, 350 aa, Triticum aestivum
  misc_feature (12)..(12): Xaa can be any naturally occurring amino acid
PRDPNPPPGPHXPPPPPPPRLYNRVRTFSRQTLLHLHQAKHTAPSSNSSTQSGGAKEAGRRDRRKCRWTPTTSTTTPTSSPAAASPARRTCPSPTSLRRCRSRCLRWASQSAFREYRGVGLELPGTARGGTGNGINIHRRMMGVLGRMVPVTEEEERPQQQHQQQQQQAAGAVESSRGFRHMMRERQRREKLSQSYADLYAMVSSRSKQDKNSIVQSAAVYIHELKVAKEQLQRRNDELKAKILGHDAQQQCVKVQFEVDEPSSSVDSMIGALRRLKSMNVKTRGIHSTLSGQRLTTEMNVETTIAACEVENAVEEALQEVERNQLPDSEAPFPGSRSAWPPTSHVQNVS

SEQ ID NO: 2230 - protein, 292 aa, Craterostigma plantagineum
MGFVDLRNAGLVLDLGLSVNASYEQKLEDHHQLGCNNKLIISEHHQPQTYLTLSLSADHRRDQTFAVLDSDSKQKIGTAAGFNDQISGDVISAANSSSLSNVISSCVKREREVVGGEDLDMEAKVSSSSSKLIIVDEVIDDDGSNGRKKLRLTKAQSALLEESFKHHSTLNPKQKQDLARELKLRPRQVEVWFQNRRARTKLKQTEVDYALLKKCCETLTEENRKLQKEVQELKALKLAQSPLYMHLPATAATFAVCPSCGGAGGVGAANSGFTLAMKPHLCNPFTNRSSAF

SEQ ID NO: 2231 - protein, 503 aa, Oryza sativa (indica cultivar-group)
MFGNYGQRYIVLTEKDINERQEEDIGKVSAVLSIRREEACVLLHHYKWNISKLSDEWFADEEKVRDIVGLLLNGIDLPNSRKLTCGICFEGYSSDVMSSAGCDHFYCHECWEGYISAAISDGPGCLSLRCPDPSCGAMVLQNMINKLAKDDDKVRYARFILRAYVEDSKKCTEEAHRPVNCETVSRWILKNSAESENMNWILANSKPCPKCKRPIEKNQGCMHMTCTPPCKFEFCWLCLGSWAEHGERTGGFYACNRYESAKKEGVYDETEARRERAKNSLERYMHYYERWASNQTSRQKAQADLQKAEKEQLAKLTDVFGIPETQLKFIIEAWSQIIECRRVLKWTYAYGYYLDDKVKSEFFEYLQGEAESGLERLHQCAEKDLQSFLTVRSDNTEPAPSIAEFGDFRVKLAGLTSVTRNYFENLVQALEAGLEDVHSTAQGTTSSNATNIPSKKAVTKGKTKKQLPRTSSDNSDEGWPCERCTFINPSSVDACSVCDKHRY

SEQ ID NO: 2232 - protein, 238 aa, Oryza sativa (japonica cultivar-group)
MGEEAPEEYELGGGEDERVMEWETGLPGADELTPLSQPLVPAGLAAAFRIPPEPGRTLLDVHRASAATVSRLRRASSSSSSSFPAFASKGAGTGADEAESGGGADGGNGNTNNSSSKRARLVWTPQLHKRFVEVVAHLGMKNAVPKTIMQLMNVEGLTRENVASHLQKYRLYVKRMQGLSNEGPSPSDHIFASTPVPHASLHDQVPSPYHPHPHHHSYNNAAYAATVSSYHHYHHANH

SEQ ID NO: 2233 - protein, 234 aa, Triticum aestivum
  misc_feature (66)..(66): Xaa can be any naturally occurring amino acid
  misc_feature (117)..(117): Xaa can be any naturally occurring amino acid
MTFSVSAAMEGGHGHEYMIRFDGHLEDPSPSTATAEPPPPPPPFAGRAISPEQEHGAMVAALLHVXSGYTTPPPDFFPAAAGKEVCPVCRVHGCLGCEFFGAAEATGATAAAFGTRXKAAMTAGGPQRRRRNKKNKYRGVRQRPWGKWAAEIRDPRRAVRVWLGTFDTAEDAARAYDRAAVEFRGPRAKLNFPFPEQQQNGGQETGDQLWDGLQDLMKLDESELWFPPSANSWD

SEQ ID NO: 2234 - protein, 211 aa, Aloe vera
MISRAMQARNYNLGVRSQPMKLAAAAAPPQPKPTKLYRGVRQRHWGKWVAEIRLPKNRTRLWLGTFDTAEEAALAYDKAAYKLRGDYARLNFPHLKHTGAHLAPGGPLHSSVDAKLQAICQSLEQNKSSNSNSSKKEKRGDAVEEKSDKVVVVVAEGEESCSSSSMNTGSASSPSSEIESLDFTEVPWDESEDFVLRKYPSWEIDWDAILS

SEQ ID NO: 2235 - protein, 427 aa, Glycine max
  misc_feature (398)..(398): Xaa can be any naturally occurring amino acid
IRLERSSTIENSSPCRPNPTSSFSLQYLYPNPPFLNKNKKIKKNPSISWTSMTSLSTHHTYSRKQKSLGLLCTNFLSLYNKEGVRLVGLDDAASRLGVERRRIYDIVNVLESVGVLTRKAKNQYTWKGFCAIPAALQELKDEGLKENPGSFDDSNDNAKVSDDEEEEEETFPNINIGSQSEKENPDYTATVKSSKNENRREKSLALLTQNFVKLFVCSNFEMISLDEAAKLLLGNANNRTKVRRLYDIANVLSSMNLIEKTHTTNTRKPAFRWLGVRGKTWGGSVDLAQNSNVKESRKRMFGTDIGNISFKRNKVDLSMDGQNSKMQNQHENISPRAQLEKIIIKKDAKQTSESYQFGPFAPAYVPKVGTSENNSVKKVHDWDSLAQEHRPQYQNQGXALKDLFSHYMEAWKSWYSEAAGKKSTKTL

SEQ ID NO: 2236 - protein, 174 aa, Glycine max
ANGWSSREKSRLSVRRVHQVPRQDENSMAITAVAPSDEEIVDVKPLQVSRDMVHIPGPKRSNLSLDILIMEAITCLKENGGSNKTAIAAFIEVNRKYRIAPIAAYSDRRRNSSVLYLEGRQKASMKIDRDETNILTRSQIDLELEKIRSMTPQEAAAFAARAVAEAEAAIAEAE

SEQ ID NO: 2237 - protein, 392 aa, Zea mays
EAGIRLVHALLACAEAVQQENFSAAEALVKQIPMLASSQGGAMRKVAAYFGEALARRVYRFRPPPDSSLLDAAFADLLHAHFYESCPYLKFAHFTANQAILEAFAGCRRVHVVDFGIKQGMQWPALLQALALRPGGPPSFRLTGVGPPQPDETDALQQVGWKLAQFAHTIRVDFQYRGLVAATLADLEPFMLQPEGDGDTDDEPEVIAVNSVCELHRLLAQPGTLDKVLGTVRAVRPRIVTVVEQEANHNSGTFLDRFTESLHYYSTMFDSLEGAGSGSGQPTDASSPAAAGGTDQVMSEVYLGRQICNIVACEGAERTERHETLVQWRGRLGGSGFEPVHLGSNAYKQASTLLALFAGGDGYRVEEKDGCLTLGWHTRPLIATSAWRVAAP

SEQ ID NO: 2238 - protein, 312 aa, Nicotiana benthamiana
MGEEVKITGGEAFAGDDNRILEWEDGLPSLDDITPLSQALIPPELASAFKISPEPAKTMTDVNRASENTFSSLRGSGPLQQLQILSSPETEHGSDPRKTRRIDPEMLEADSALPRNENCGGGDDSNNKSASKTLNKRPRLVWTPQLHKRFVDVVAHLGIKNAVPKTIMQLMNVEGLTRENVASHLQKYRLYLKRMQGLSNEGPTSSDHLFAFTPVPQSLQQSGGNGQNGNGHNSSGYNSNGHNSNGHAQMPMQMPMPMPMIYPPQMVPMPMMGISGHGHGHGFHHQYNMGAQQRDWSGNKFGSYHHVAPSDE

SEQ ID NO: 2239 - protein, 255 aa, Malus x domestica
MGRGRVQLKRIENKINRQVTFSKRTSGLLKKAHEISVLCDAEVALIVFSTKGKLFEYSTDSCMERILERYERYSHAERQLLANDNESTGNWTLEHAKLKARVEVLQRNQSHYMGEDLQILSFQELQNLEQQLDSALRRIRSRKNQVMYESISELQKKDKALQEQNNLLAKNVKEKEKAVTSQAQLDHAQKQSLDSSSTLLPQELQYLNFSRSNYHQAIRSSNGISGDNQQDGDETATPHRPNTLLPPWMLRHLNE

SEQ ID NO: 2240 - protein, 390 aa, Oryza sativa (japonica cultivar-group)
MPSYAHHHSSLDGKMDALKSSCRSEEAADEGAAAAPSAWGMVERDGFSVEDLLDLEEFCEAEKDAAEENEQALALVAAPEEEKSKDDSQPSSVVTYELVAPPPPPPEIVDLPAHDVEELEWVSRIMDDSLSELPPPPQPPASVVASLAARPPQPRQLQRRPQDGAYRALPPASYPVRTPTICALSTEALVPVKAKRSKRSRATAWSLSGAPPFSDSTSSSSTTTTSSCSSSASFSSFSPLLKFEWHPLGGTSDLPDDHLLPPGKKSKHGKNGKNKPKKRGRKPKQLPPHPSGAAASAPAPGDRRCSHCGVQKTPQWRAGPEGAKTLCNACGVRYKSGRLLPEYRPACSPTFVSAIHSNSHRKVLEMRRKKEVGSGLLTAAAAAAPAVASF

SEQ ID NO: 2241 - protein, 132 aa, Triticum aestivum
  misc_feature (77)..(77): Xaa can be any naturally occurring amino acid
  misc_feature (94)..(94): Xaa can be any naturally occurring amino acid
  misc_feature (103)..(103): Xaa can be any naturally occurring amino acid
  misc_feature (105)..(105): Xaa can be any naturally occurring amino acid
  misc_feature (107)..(107): Xaa can be any naturally occurring amino acid
MEGCDRIRGPWSPEEDAALRRLVECHGARNWTAIGRGVPGRSGKSCRLRWCNQLSPGVERRPFTAEEDAAIARAHAXRLGNRWAVIARLLHRRXDNAVKNHWXCXLXRKLACWRSQDEEFKARQESNSIGVR

SEQ ID NO: 2242 - protein, 185 aa, Solanum lycopersicum
MGEEVSLTDYESSGGNDDRLLWEIGLPDVDDLTPLNMQLIPSELAAAFRISPELSKTMTDVNRASQNTFSSLQRWHSQDMASMNNSNFKTFSYERSREETVTERDETDLIREGSDSRKLRRVESGGTEEADSSLCNENFADDSSAKTLKRPRLVWTPQLHKRFIEVVAHLGIKGAVPKTIMQLMN

SEQ ID NO: 2243 - protein, 256 aa, Medicago truncatula
MEQTMHNNNVSVGSPQQLVTTNTLPQEMNMNISVGNSIVTTIGTSIVALEAPTVTPTTTTPGSLDLFGKKKRGRPRKYDADGNLNPSYKKIVKTTTPILTSPPGFTLSTNEFASKKGRGKSTGFVNYQTFSSFGEVFPSTAAVDFAPHVVTVYAGEDVGGKILSFAQKSPRGICILSANGAISKVALGQPGSTGGSILTYEGRFEILSLSGSYTASDNSGIRTREGGLSVSLAGPDGRVIGGAVAGVLIAAGPIQV

SEQ ID NO: 2244 - protein, 255 aa, Malus x domestica
MGRGRVQLKRIENKINRQVTFSKRRSGLMKKAHEISVLCDAEVALIIFSTKGKLFEYSNDSCMERILERYERYSYTERQLLANDNESTGSWTLEHAKLKARVEVLQRNQRHYMGEDLQSLSLKELQNLEQQLDSALKHIRSRKNQVMYESISELQKKDKALQEQNNLLAKKVKEKENAVAQQAQLEHVQEQRLNSSSSLLPRALQSLNFGSGSNYQAIRSSEGIPGDNQQYGDETPTPHRPNMLLPAWMLRHLNE

SEQ ID NO: 2245 - protein, 368 aa, Gerbera hybrid cv. 'Terra Regina'
MGRAPCCEKVGLKRGRWTAEEDDILTNYIKTHGEGSWRSLPKNAGLLRCGKSCRLRWINYLRSDIKRGNISKEDEDVITKLHASLGNRWSLIAAHLPGRTDNEIKNYWNSHLSRKIIPSRRLLNTPATPVPAKLSSHPLNKRKGRTSRSAMKINKTHKSSSRDIGANNREVDGAIDTTPLAPSIEKESNVYMEPCAASHEYSDDGQKRERHDNEAEVVDDVGMFCFNEIMDGGALTDPHGVLSLAEKETEKDLALMNVVTSEEERQNVSEPISIIGGEEVNKTGSCATSTSTDSCNVGDHDNILSGPWDWKWNFDVEEGMLGLGVEDEDNILSWPWESTTTTDSGNGDTDFVGEDLEKQNAMVAWLLS

SEQ ID NO: 2246 - protein, 381 aa, Arabidopsis thaliana
MRLNGDSGPGQDEPGSSGFHGGIRRFPLAAQPEIMRAAEKDDQYASFIHEACRDAFRHLFGTRIALAYQKEMKLLGQMLYYVLTTGSGQQTLGEEYCDIIQVAGPYGLSPTPARRALFILYQTAVPYIAERISTRAATQAVTFDESDEFFGDSHIHSPRMIDLPSSSQVETSTSVVSRLNDRLKRSWHRAIQRWPVVLLVAREVLQLVLRANLMLFYFEGFYYHISKRASGVRYVFIGKQLNQRPRYQILGVFLLIQLCILAAEGLRRSNLSSITSSIQQASIGSYQTSGGRGLPVLNEEGNLITSEAEKGNWSTSDSTSTEAVGKCTLCLSTRQHPTATPCGHVFCWSCIMEWCNEKQECPLCRTPNTHSSLVCLYHSDF

SEQ ID NO: 2247 - protein, 240 aa, Medicago truncatula
MSPPKPYINQLKSLTFPSTSKSSKPSKTQFPYMNYAFSTTTLTSDQELSVIVAALTNVVSGSTSTVGLDRIVQPVNIETCRECNIAGCLGCNFFPEEKKQKQKQKQKRAKNNKYRGVRQRPWGKWAAEIRDPRRAVRVWLGTFTTAEEAARAYDNAAIEFRGPRAKLNFPLVDESLKRTVEDPELVVHVKDEEMQIETTMGFGNNTTECDFWDSIGEEADFQQLMRFMDSSHSRTGNTFN

SEQ ID NO: 2248 - protein, 266 aa, Gerbera hybrid cv. 'Terra Regina'
MGRTPCCSKVGLHRGAWAIEEDKLLTDYIQTHGEGQWRALPSNAGLLRCGKSCRLRWMNYLRPGIKRGTFTSDENDVIIRLQSLHGNRWSLIAAELPGRTDNEIKNHWNSHLRRKSAENADTHHGKVSKNNKKAKKKRKSDDRRAETTTPEKSKKVKLPDSSVSSSSSCVSLSKNDSSDNGIMSSTGASSSCTIDLEDADFDFSWSDWTPLLEVEGTTSINGEQDKGFLMDGCDLLMSKEDESLRLEKLYYEYLDLLDHEDGDGNN

SEQ ID NO: 2249 - protein, 239 aa, Asparagus officinalis
MGRGRVELKRIENKINRQVTFAKRRNGLLKKAYELSVLCDAEVALIIFSNRGKLYEFCSSSSMLKTLERYQKCSYGAPDTSVQIRESQMLQSSHQEYLRLKARVEALQRSQRNLLGEDLGPLSSKELEQLERQLDSSLKQIRSTRTQYMLDQLADLQRREQMLCEANRSLRKRLEESSQANQQQVWEDANAMGYNRQPNQPHGDQFFHPLECQPTLQIGFQPDQMPGPSVSNYMPGWLA

SEQ ID NO: 2250 - protein, 231 aa, Medicago truncatula
MNNSSSSFSSSTLPSDQEQSVIVTALTKVVSGSTSTANSLPEFHLPDSTIGSSSSMERIPPTNMETCRECNIAGCLGCNFFSQENKKKQIRAKKKYRGVRQRPWGKWAAEIRDPRRAVRVWLGTFTTAEEAARAYDNAAIEFRGPRAKLNFPLVDESLKHVEEPEVIVHSKHVTKDENMNQEMQIETMTGFENNKDCDFLDSIGEPDFQQFMKFMEFSGDSSGSRTGNPFN

SEQ ID NO: 2251 - protein, 223 aa, Arabidopsis thaliana
MAFAGTTQKCMACDKTVYLVDKLTADNRVYHKACFRCHHCKGTLKLSNYNSFEGVLYCRPHFDQNFKRTGSLEKSFEGKLPKTDQNVKSFVSGDFKFGIIYLKFDSYICTGTPKIGKPDRPLEGERPAGTKVSNMFGGTREKCVGCDKTVYPIEKVSVNGTLYHKSCFKCTHGGCTISPSNYIAHEGKLYCKHHHIQLIKEKGNLSQLEGGGENAAKDKVVAA

SEQ ID NO: 2252 - protein, 241 aa, Asparagus officinalis
MGRGRVELKRIENKINRQVTFSKRRNGLLKKAYELSVLCDAEVALIIFSSRGKLYEFGSAGTSKTLERYQRCCYTSQDAAIASHETQSWYQEVSKLKAKFESLQRSQRHLLGEDLGPLSVKELQQLERQLESALSQARQRKTQIMLDQMEELRKKERHLGEINKQLKAKLEAEGASFRAIQGSWESEAGVGGNAFSMHPSQSSAMDCEPTLQIGYHHLVQPEAALPRSSGGENNFMLGWVL

SEQ ID NO: 2253 - protein, 221 aa, Hemerocallis hybrid cultivar
MGRGKIEIKKIENSTNRQVTYSKRRSGIMKKAKELTVLCDADVSIIMFSSTGKFSEYCSPGTDTKTVFERYQQATQTNLWSTQYEKMQNTLNHLKEINHNLRKEIRQRIGEELDGMDFKELRGLEQNLDEALKSVRARKYHVITTQTDTYKKKVKNSQEAHKTLLHELDDAVYGYADEDPGNYDSSLALAHGGSNMYAYRVQPSQPNLHGMSYGPHDLRLA

SEQ ID NO: 2254 - protein, 224 aa, Asparagus officinalis
MGRGRVELKRIENKINRQVTFAKRRNGLLKKAYELSVLCDAEVALVVFSTRGKLYEFCSSPSMLKTLDRYQKCSYGAPDTSVQIRENQMLQSSHQEYLKLKARVEALQRSQRNLLGEDLGPLSSKELEQLEKQLDSSLKQIRSTRTQYMLDQLGDLQRKEQMLCEANRSLRKRYAQLEEASQANQQQVWEANANAMGYSRQPSQPQGEEFFHPLECQPSLGGQC

SEQ ID NO: 2255 - protein, 240 aa, Triticum aestivum
MSLPPTDGGDDWFLDCGILEDLPAAACGAFPWDASVSSSNPSAEVGSYVNNSDVPKDSGSNKRLRSEPCGRPTSKACREKVRRDKLNDRFLELGTTLDPGKPVKADKAAILSDATRMVTQLRAEAQQLKDTNGSLEDKIKELKAEKDELRDEKQKLKLEKETLEHQMKLLTATPAYMPHPTMMPSPFAQAPMAPFHAQGQALGQKLMMPFVGYPGYPMWQLMPPSEVDTSKDSEACPPVA

SEQ ID NO: 2256 - protein, 404 aa, Zea mays
  misc_feature (382)..(382): Xaa can be any naturally occurring amino acid
MGRHSCCYKQKLRKGLWSPEEDEKLMNHITKHGHGCWSSVPKLAGLQRCGKSCRLRWINYLRPDLKRGAFAQDEEDLIIELHAVLGNRWSQIAAQLPGRTDNEIKNLWNSCIKKKLRQKGIDPNTHKPLTEADRGGAAPTISTERTSGSSDVNPSSTGPLGNLSPLLSETAQSSMLMPVYDKNRAETPNLARPKLPPKELFLEQLTAGHESPSTCHSSGQTLYFPFQQPLGYNSESGSSDGANMNSLWFNQSDFNCSTISTVMPPVSPSALSTSMGLNLPPDNPRHGGTGIGSTAVDSFYWDGTNPSSSSSTGSRGSNSMGFEPQSTSTILENSVFPWTDIGQEKDTRAHLVAELKWPDSFAETTTAMQNQSQTLYDDVIKXAESQFNIEGICASWFQNQQPQQ

SEQ ID NO: 2257 - protein, 158 aa, Candida albicans SC5314
MSAAEPTNIDLNSLPPQQLIEFRKSIDEEITHFTQSLQALSAAQSKLKDCISSINNLEQSKENDLLVPLTSSLYIPGQVVTRNKYLVDIGTGYYVEKSADKAKLGYNNKIKKLDDDAKKLKNILVQKNELLNTVNLILRRKVIEMEQEQEGSSAGVTN

SEQ ID NO: 2258 - protein, 335 aa, Medicago truncatula
MRSTGGEIVQVEGGHIVRATGKKDRHSKVYTSKGPRDRRVRLSAHTAIEFYDVQDRLGYDRPSKAVDWLIKKAKSSIDKLAELPPWHPISENQTLKPLEEVQNVVANSSGMVVGETSESNGYSFHLLRQLSENQGNHNSAFISPHNVETDPIPFFPTTSSTSSSINFQNYPSENLGLSLHSFQDHNGFIPWQSQQVCENHETSNENQNQNQTFFENQYHRIENWNNETTNDYIKKVGFMVNSQSFLGQGSGSEYSPNETLQSNFSHSVRTWNEIPMDSSSEVHHHRSQQVHQASIFGSRFVSDGLAGFCIPDTVQGGEEGHRVSSNRPSSSPNHN

SEQ ID NO: 2259 - protein, 289 aa, Medicago truncatula
MGRKCSHCGNIGHNSRTCNSLRGSGSFVGVRLFGVQLDLSSSCVSMKKSFSMDSFPTSSSSPTSSFSSSRLTIDDRASIGYLSDGLIVRTQERKKGVPWTEEEHRKFLVGLEKLGKGDWRGISRNYVTTRTPTQVASHAQKYFIRLATLNKKKRRSSLFDMVGSGKTNKTVDPNNSSKSKSGDSVCRHDHEVEKDATLSLLINSLQQQTKSDDYDMQKIEDDSEEAEHKDVPDWLHPLTKSLNMTLVIPNSSNVAPPDLELTLAGSKSNNMEQDKTSSSSFLIGPISVT

SEQ ID NO: 2260 - protein, 165 aa, Cryptococcus neoformans var. neoformans JEC21
MEASADAVHAPTVAGISGNANDGAWSVALSGGYPDDIDLGYAFTYTGCGGRDLKGTKQNPKNLRTAPQTSHQSFDNPLNAALKRSAETRNPVRVIRGFKLQSKYAPPTGYRYDGLYVVEKAWMAKGLTNGLMVCRYAFKRMDDQEPLPERDLDHDDDNDKARPSE

SEQ ID NO: 2261 - protein, 222 aa, Zea mays
MENYHMLFGTTATHAQPSSAAGTPSSYNFIATSTSSASGLRRDHDRGQHSGHVHAAGGSSSPSSFFVAERLSHNDDSSKDGGGGPGPAAAGSGEKEAEADDRPAAARRKGEKKERRPRFAFQTRSQVDILDDGYRWRKYGQKAVKNNNFPRSYYRCTHQGCNVKKQVQRLSRDEGVVVTTYEGTHTHPIEKSNDNFEHILTQMQIYSGMGSTFSRSSHDMFH

SEQ ID NO: 2262 - protein, 272 aa, Arabidopsis thaliana
TNANSVLLSLAAPTTPLPGLSCYVGANFTTHQFTVNGGEDVTMKVMPYSQQGSRAICILSATGSISNVTLGQPTNAGGTLTYEGRFEILSLSGSFMPTENGGTKGRAGGMSISLAGPNGNIFGGGLAGMLIAAGPVQVVMGSFIVMHQAEQNQKKKPRVMEAFAPPQPQAPPQLQQQQPPTFTITTVNSTSPSVNTVEEQKPQAYGGGIVRPMAQMPSSFQNDNSTMNNFTPAYHGYGNMNTGTTHKEEHEDEDGGDDDDDSGDTRSQSHSG

SEQ ID NO: 2263 - protein, 645 aa, Oryza sativa (japonica cultivar-group)
MGRSRGVPNSGDDETNHRSKRRRVASSGDAPDSLSAACGGAGEGGGKKALYHCNYCNKDISGKIRIKCSKCPDFDLCVECFSVGAEVTPHRSNHPYRVMGIEMYGLGNWAEVAEHVGTKTKAQCIDHYTTAYMNSPCYPLPDMSHVNGKNRKELLAMAKVQGESKKAAQYFQLDVRSIWAFVWIAEAELRVLPPPSSAGRQHTALPRDRSGHAWSRRRRGRAQPRHHRSSSLRLRRMDEKALGEAAEGRREVELADGWRRRSGSQSLSFPVRSASAVVYQLFNLHRVEDALGEGLAGRSPSHIAGGANKKASNVGQFKDGANVAKVEDGHVDRSIGVKKPRYSADEGPSLTELSGYNSKRHEFDPEYDNDAEQALAEMEFKETDSETDRELKLRVLRIYLSRLDERKRRKEFILERNLLFPNPLEKDLTNEDKEVYHRYKVFMRFLSKEEHEALVRSVLEERKIRRRIQELQECRSAGCRTLAEAKIHIEQKRKKEHEVNAQKAKESGQLLSNTKVVHKTNRPMKIESDGNLDQKKGGASLDSTGRDSPKTTGHAGTKHWDDWDIVGFPGAELLSTSEKNLCCQNRLLPNHYLKMQEVLMQEIFKGSVAKKEDAHVLFKVDPAKVDNVYDMVTKKLGTNEEAPTV

SEQ ID NO: 2264 - protein, 191 aa, Glycine max
MEQELQRNSVHDDEAATTTSSGDKPATPRGGGTRHPLFRGVRKRRWGKWVSEIREPRKKSRIWLGSFPAPEMAAKAYDVAAYCLKGRKAQLNFPDEVHRLPLLPSSCTARDIQAAAAKAAHMMMVQAASADSPEKSSSITSDCDGSGGDDFWGEIELPELLNGKWWASDRHVTPWPETELPPQLPFTTACL

SEQ ID NO: 2265 - protein, 314 aa, Solanum tuberosum
MGEEVNLTDYEYSGGNDDRLLWEVGLPDVDDLTPLTLQLIPSELAAAFRISPELSKTMTDVNRASQNTFSSLQRWHSQDMASMNNSYFKPFSYERTREETVTERDETDLIREGSDPRKLRRVESGGTEEADSSLCNENFADDSSAKTPKRPRLVWTPQLHKRFIEVVAHLGIKGAVPKTIMQLMNVEGLTRENVASHLQKYRLYTKRMQPNEGPSSSDHLFTSTPAAESMRESSEGGHLRNTNGHMAAPTLMPYQPQMVPMPMMGMPNGGHVVMPVGYGGGPPLGFHHHYNMVQQRDWSGNNFGYYHPVASNDK

SEQ ID NO: 2266 - protein, 121 aa, Pinus taeda
  misc_feature (97)..(98): Xaa can be any naturally occurring amino acid
ERSIIDIDIDMKEEDWLAKWEEELPSPEELMPLTQNLITPDLAAAFKIHTSSASASAPTESGSVFPGSGQQQQRPGGEPPKRIELEEEESSVGGVTXXVGEEPARTLKRPRLVWTPQLHKR

SEQ ID NO: 2267 - protein, 247 aa, Brassica napus
  misc_feature (12)..(12): Xaa can be any naturally occurring amino acid
  misc_feature (238)..(238): Xaa can be any naturally occurring amino acid
MGAPKQKWTQEXESALKSGVVKHGPGKWRTILKDPEFSGVLYLRSNVDLKDKWRNMSVMANGWGSRDKSRLALKRTHSLPKQDDSSLANTSSLQSDEDMADAKHFSTTGTSALQLPATPTPRRPNVRLDSLIMEAISTMKELGGSNKTTIGAYIEEQYHAPPDFKRLLSTKLKYLTACGKLIKAKRRYRIPLSTPLSSHRRRHLGTPSGKQSVLSLPSPITDRDEVNVQTQAQIDAEXARMKTMNAH

SEQ ID NO: 2268 - protein, 287 aa, Zea mays
MSFLLKEKEMIIAAGIASMGRGRIEIKRIENNTSRQVTFCKRRNGLLKKAYELSVLCDAEVALIVFSSRGRLYEYANNSVKATIERYKKAHTVGSSSGPPLLEHNAQQFYQQESAKLRNQIQMLQNTNRHLVGDSVGNLSLKELKQLESRLEKGISKIRARKSELLAAEISYMAKRETELQNDHMTLRTKIEEGEQQLQQVTVARSVAAAAAAATNLELNPFLEMDTKCFFTGGPFATLDMKCFLPGSLQQMLEAQQRQMLATELNLGYQLAPPGSDAADNNPHHQF

SEQ ID NO: 2269 - protein, 200 aa, Sorghum bicolor
MGEEAMDDYELHMVCYGGDDDGRVMEWESGLPGADELTPLSQPLVPPGLAAAFRIPPEPGRTLLDVHRASAATVSRLRRAPSSSSSGSGGSGSSSFAPFHPHPQAAAAAGHARGDEDADSSAAALGGGNAATTTTNTGTNSKRPRLVWTPQLHKRFVDVVAHLGIKNAVPKTIMQLMNVEGLTRENVASHLQKYRLYVKR

SEQ ID NO: 2270 - protein, 1123 aa, Streptococcus pyogenes MGAS10394
MVAALSSSILFSKVDLAKAKENLEVNSTKIDDKAKIEIIKKEIAQMEKELSEKINKRERLLKEKSEISDKLSKENERLNKEIKTLNNKIKELESKQEENKKMLEFFKEKLQKANGEKETLAKDLKEKDEMIDELKKLDSASKQSIEDALTAEKQKEKESSEKVTELKANLESAKKDLEKKEADYVKENALVERDKKDLEKFEKEIAKAREKKQTTEKAIKDINASKHDLIDKDKKLKEKLETNKTSTKTLQTAYDKAKKNLEEKRTELEKLNKQYPPHGPALDQKLEEIEKEIKALEDEMKGLENTQKELEAQKQTNSQMITEKGKEVLKLDGEIGGEQGKLEEAKRKILDFNFALKEAQDAKQRYEQAKEEGTVKPDEDPGFDQIIETIKKDIQSKEQEKAGIGTKITELTGKKEKAQQEKAGLESKNRELDKQIQEKKSKVDEIKTKIGPKQQESQEIEKKIQNNIPQDVETRIEKLKEEIKTEENKVKGGEIVLLTQEREKANLEKLIKENQEKLEKLERLLAEKAKLEKEIQGLEGEIEDTNKSKPQFEKQAEEAKKARDTQKELVKKAKKDLSEEEEKLKNIQNTIKEKQNKLKGLDNKDQAIKDLEEEKAKIQENIDANKKEIEELEQEKNASKALSEKTANEIKTLKEKLLKLEEEQKAEDEKVKELKEKIKKIDEKINGLDLEINNLKAEINKKRQMLAALEQKPISEIINPLLPKNKIKVNNLEKLTEKEKEEIKNKIKDLNKNNFPKNTQVEVDEKGNVSVTYPDKSKDMIESAKLVFQESKGAATEIEKPEMSISEIINPLLPKNKIKVNNLEKLTEKEKEEIKNKIKDLNKNNFPKNTQVEVDEKGNVSVTYPDKSKDMIESAKLVFQESKGAATEIEKPEMSISEIINPLLPKNKIKVNNLEKLTEKEKEEIKNKIKDLNKNNFPKNTQVEVDEKGNVSVTYPDKSKDMIESAKLVFQESKGAATEIEKPEMSISEIINPLLPKNKIKVNNLEKLTEKEKEEIKNKIKDLNKNNFPKNTQVEVDEKGNVSVTYPDKSKDMIDASDLVEKVAQAQNNKTDAQNNPKKLVQNTNLPKTGAGDGLNPFLHEMILGISGLALAITGYFRKKHAK

SEQ ID NO: 2271 - protein, 269 aa, Aspergillus nidulans FGSC A4
MEQAQQTSGQQQGRQQPVYDTRQGGHYGASAALAAQGFAPVAELYTGTWANVNQGLQGTARDILTTYWQHVINHLESDNHDYKIHQLPLARIKKVMKADPEVKMISAEAPILFAKGCDVFITELTMRAWIHAEDNKRRTLQRSDIAAALSKSDMFDFLIDIVPREEATSHAKRSSQSAGAPAGPGGPTAAGQLPQTQHGVQHHPHHMAPPDYGALGQHPLQDQEYRQQTMYGGAVQSDPTAAYAQPQTQMFEGMYTAYPHLPPQQVRIG

SEQ ID NO: 2272 - protein, 363 aa, Oryza sativa (indica cultivar-group)
MELPADGSALARQGSIYSLTFDEFQSALGSAGKDFGSMNMDELLRNIWTAEESQAIAPAAAAASAAAVVGDAQQQQQPIQRQGSLTLPRTLSQKTVDEVWRDIMGLGGGDDEDPAAAAAAAAPAQRQPTLGEMTLEEFLVRAGVVREDMGQTIVLPPQAQALFPGSNVVAPAMQLANGMLPGVVSVAPGAAAAMTVAAPATPVVLNGLGKVEGGDLSSLSPVPYPFDTALRVRKGPTVEKVVERRQRRMIKNRESAARSRARKQAYIMELEAEVAKLKEQKAELQKKQVEMIQKQKDEVMERITQQLGPKAKRFCLRRTLTGPCCCICSVCCCCVDMSSRLQFSDSVLYPSLRGFSFSDLHVI

SEQ ID NO: 2273 - protein, 339 aa, Cymbidium hybrid cultivar
MSTSSVHLPPGFRFHPTDEELILHYLRNRAASSPCPASIIAEVDIYKFDPWDLPEKAAFGDREWYFFTPRDRKYPNGNRPNRAAGSGYWKATGTDKPISSGSENIGVKKALVFYKGRPPKGLKTNWIMHEFRLADANKSNSYKPIRLRDHSMRLDDWVLCRIYRKSNHLSPTEMDQEQEDPCGEETCFPAMQNQMMPMNHGMKLQKVSSISEFLQEYSPLLNLFDNQQEIPRFDSNSLLGHPLLSQSMINQNQDSGGNGYFLPQLSQAESPVSIGAKRQRMDDCTNEESNGTSHSSKKQNDLNMFPNFSSQFDGSQYGLLSQPFFSQQLLMNSNTGSLH

SEQ ID NO: 2274 - protein, 200 aa, Arabidopsis thaliana
MSSAIVVSQDAESLGLQIYSRKEKSLGVLVSNFLRLYNRDDVDLIGLDDAAGQLGVERRRIYDVVNILESIGIVARRGKNQYSWKGFGEIPRSLDELKEEGMRERLGYSSSNNSDKVSNGCEREEPLTLTPDDQENSSSSKMDQKKEKSLWLLAQNFVKMFLCSDDDLITLDSAAKALLSDSPDSVHMRSTSIFPVLDLF

SEQ ID NO: 2275 - protein, 241 aa, Glycine max
MGRGRVELKRIENKINRQVTFAKRRNGLLKKAYELSVLCDAEVALIIFSNRGKLYEFCSSSSMLKTLERYQKCNYGAPEANVSTREALELSSQQEYLKLKARYEALQRSQRNLMGEDLGPLSSKELESLERQLDSSLKQIRSTRTQFMLDQLSDLQRKEHLLSEANRSLRQRLEGYQINPLQLNPGVEEMGYGRHPAQTHGEALFQQMECEPTLQIGYQPDPVSVVTAGPSMSNYMAGWLP

SEQ ID NO: 2276 - protein, 238 aa, Oryza sativa (indica cultivar-group)
MTKRKIEIKRIKNEEARQVCFSKRRPSVFKKASELYTVCGAEVAMLVKSPAGKFFSFGAPSVGFVLSRFHATTTSRKHSSMGVTTQHDNSATIKLHELNQQHIELQNQLQAQNEKMKALQEVAKKESGGKVMGWLNSKVEDICQEDLEEFKMVLESLKYLTRGIINQLFQNYAMFSNMMRVQHCVTALPNQQFLPSSEDVKPMIHHVPSSSYGWNTSIDSKPNSSDAHVVGARRYFPK

SEQ ID NO: 2277 - protein, 975 aa, Ashbya gossypii ATCC 10895
MSGYYNHVKHQGYSRYGQNSTVRNGQHDGLRYRNPSPAHNGTNEGEGLQGSRYENAGGVTHARRPPPVVKWGEAAFRAKYHYFDVEERKLLHLDEMKHWQNGRLPANGYVLVADAGSKGRPVMRERNPEEQAVDPRGARAAHTVRRVRSLLTALPRIPYDAHWVGPEPPKEVVVFPKQREQALSVQDPIIKNFFGTFGEVAHFESFNDPNNALPLNIYLVRYINVEGNPDSPYKAAYKAVKQFAKQDYLVSGARFAVRLNMNGFLQKTIDKFVTENLQRAAKLRHEQAKQQSTVQKVTNVSAVPSGVPPPKIPLGLERIVNNKPILRVSARFCALHGITSEDFKYGLKNYHWTRVINHYSGIYIIFDDIAEAEKCLQMESLRLTFFSRRRKIPVKIKFMLIEPSHQPPASQPLTDQDEVPKVYETEAELIEETLKHIINELKTTLYKDIRRRLLGPTIFDALNPGNYPDIVARRQKEEEAKKEKEKAMVEKTKKEAPSAAAFDIFNLYGTAYKKRDGTKGKKRHVAEGRPEESSGRRRIQSKGTAPMAHMLNYESLKVNGTASPIKEAESETCSSDEEDDDNFDVEMTDQSSIKKLKRESTATTPEQEPLQERVAGLSAERTKELLSYPEKYRPLAGDQPEPIYPEFLIEKYDDLLLSLVDLQRSVKDKEVMELLKKVIAYDREEVKDVINDIEFFAWRLHRDYKEHKENMQHQSKLSESTYKNLLNAHGGCFKQQGFRKMPDKLKSIYLPHRRKLNQPLNTVYHHGIEDFANTDNNKMDTDPPEDTFTPEQTSSRVNRALQRRFQQDIEAQKAAIGTESELLSLNQLTKRKKPVTFARSAIHNWGLYALEPISAKEMIIEYVGERIRQPVAEMREKRYLKSGIGSSYLFRVDESTVIDATKKGGIARFINHCCDPSCTAKIIKVGGMKRIVIYALRDIAANEELTYDYKFERETDDEERLPCLCGAPNCKGFLN

SEQ ID NO: 2278 - protein, 273 aa, Triticum aestivum
MMSMMADLSCGASGVTANDHQLAAPAPEDSAAAGSEKMGRGRIEIKRIENTTNRQVTFCKRRNGLLKKAYELSVLCDAEVALIVFSSRGRLYEYSNNSVKATIERYKKANSDTSNSGTVAEVNAQCYQQESSKLRQQISSLQNSNSRSLVRDSVSTMTLRDFKQLEGRLEKGIAKIRARKNELMYAEVEYMQKREMELQNDNIYLRSKVSENERGQQPVNMMASGSASSEYDHMVSPYDSRNFLQANIMQQQQQHYSQQLQPTALQLGQQYFN

SEQ ID NO: 2279 - protein, 264 aa, Medicago truncatula
  misc_feature (208)..(208): Xaa can be any naturally occurring amino acid
MAQHPVPRTVEEVFSDYKGRRAGLIKALTTDVEKFYQLCDPEKENLCLYGFPNETWEVNLPVEEVPPELPEPALGINFARDGMQEKDWLSLVAVHSDSWLLAVAFYFGARFGFGKNDRKRLFQMINDLPTVFELATGTAKQSKDQLTAHNNGSNSKYKSSGKSRQSESQTKGVKMSAPVKEEVDSGEEEEDDDEQGATCGACGDNYGXDEFWICCDMCEKWFHGKCVKITPAKAEHIKQYKCPGCSIKAKNWIALNVWTISGQD

SEQ ID NO: 2280 - protein, 241 aa, Nicotiana sylvestris
MGRGRVELKRIENKINRQVTFAKRRNGLLKKAYELSVLCDAEVALIIFSNRGKLYEFCSSSSMLKTLERYQKCNYGAPETNISTREALEISSQQEYLKLKARYEALQRSQRNLLGEDLGPLNSKELESLERQLDMSLKQIRSTRTQLMLDQLTDLQRKEHALNEANRTLKQRLMEGSQLNLQWQQNAQDMGYGRQTTQTQGDGFFHPLECEPTLQIGYQNDPITVGGAGPSVNNYMAGWLP

SEQ ID NO: 2281 - protein, 276 aa, Glycine max
MDTTLFRVVSSFQHQHQPDHDQSLNNSTTSSSSRSSRQQQNYPYPQEHDEECFNFFMDDEDLSSSSSKHYYPYQPHPPSTTDHSFSPTPGVDVVFPFEFSSGKWAQDILLETARAVADKNTTRLQQLMWMLNELSSPYGDTDQKLASYFLQAFFSRITQAGDRTYKTLASASEKTCSFESTRKTVLKFQELSPWTTFGHVASNGAILEALEGEPKLHIIDISNTYCTQWPTLFEALATRNDDTPHLRLTSVVTADATAQKLMKEIGARMEKFARLM

SEQ ID NO: 2282 - protein, 135 aa, Glycine max
ALGQARDLLSEVTGGERQLWTLTLTVYAGENREQEGPSTQAVPQEIQLEQQPQVTQPPMIDVEAIDDDVVECTPRAFAEAKNNSRRIRRRTVVDIDLEDQTRRNKRRRELPNLIINCDKYINLEGSSSSMVKKSF

SEQ ID NO: 2283 - protein, 324 aa, Arabidopsis thaliana
  misc_feature (279)..(279): Xaa can be any naturally occurring amino acid
MNIVSWKDANDEVAGGATTRREREVKEDQEETEVRATSGKTVIKKQPTSISSSSSSWMKSKDPRIVRVSRAFGGKDRHSKVCTLRGLRDRRVRLSVPTAIQLYDLQERLGVDQPSKAVDWLLDAAKEEIDELPPLPISPENFSIFNHHQSFLNLGQRPGQDPTQLGFKINGCVQKSTTTSREENDREKGENDVVYTNNHHVGSYGTYHNLEHHHHHHQHLSLQADYHSHQLHSLVPFPSQILVCPMTTSPTTTTIQSLFPSSSSAGSGTMETLDPRQMXNNGGRDIDNRMSSVQFNRTNSTTTANMSRHLGSERCTSRGSDHHM

SEQ ID NO: 2284 - protein, 406 aa, Ustilago maydis 521
MTAPSSSSSASMARANFELNNAIIPLSSTTLDSIFAYDNEAQRAILHAQPWKTDPHFFQKVRISAVALIKMVMHARSGGIYEIMGLMQGKIDVENRTLYVMDSFALPVEGTETRVNAQNEAYEYMVQYLDHSKEVGRLENVVGWYHSHPGYGCWLSGIDVNTQRTNQQFQDPFVAIVIDPNRTISSGKVDIGAFRTFPEGYTSSSSIGGGDSEYQSIPLSKIEDFGVHANEYYPLEVEHFKSSLDGKLLDLLWNKYWQNTLSQSPLVSNRAYTTSQIRDLADKLAQTNAAVLNRNSVSSAPFTTTAGAASVRIGAGKDVAAETEQNSGGSAKDTPAGTAQDAAGLVKEFEQRSKMSAISRASNDAAKLASEANHGLLASQLKHTLFHNHTATPTPASASAPTPIRL

SEQ ID NO: 2285 - protein, 84 aa, Dubautia reticulata
KRRNGIFKKAHELTVLCDAKVSLIMFSNTGKFHEYISPSTTTKKIYDMYQTTLGFDLWSSHYERMTETMKKLKDSNNKLRREIG

SEQ ID NO: 2286 - protein, 285 aa, Zea mays
MAGQPPPSGASEDDFLEHFFAFPSAASAGAAGGHAGAGVGGDHPFPLALSLDAAAEAKPDRDPVQLAGLFPPVFAGAGGVHQPHLRGPPPPQMFQAQPKPGEGGMAPQPPAPRPKVRARRGQATDPHSIAERLRRERIAERMRALQELVPNTNKTDRAAMLDEILDYVKFLRLQVKVLSMSRLGGAGAVAQLVADIPLSVKGEAGDGGGAPQQQQQQHVWEKWSTDGTEKQVAKLMEEDIGAAMQFLQSKALCMMPVSLAMAIYDTQHPLDGHGHSLKPEPNASS

SEQ ID NO: 2287 - protein, 433 aa, Vicia faba
MGSRIRVSFEDEKGAETGMPSFNSDDACYTEGNTVDAFHVSDFGAFGQPYRIEDAVALSGNSNSVFNSLKVSGQTISPGPAHISTLGKFPTSLDKSPLENQTEPHRLQLTKLQSSNLSSSSILSVHIENQEEFTMADASPRTDISTDVDTDDKNQRFDTNQSLVPVGSDSSDRSKDKSDQKTLRRLAQNREAARKSRLRKKAYVQQLESSRLKLTQLEQELQRARQQGVFISSSGEQTHSLSGNGAMQFDAEYARWLEEQNRQINELRAAVNSHASDTELRMIVDGILAHYDEIFRLKGVAAKADVFHLLSGMWKTPAERCFLWLGGFRSSELLKLLVSQLEPLTEQQLMGITNLQQSSQQAEDALSQGMEALQQSLAETLSTGAPSSSGSSGNVANYMGQMAMAMGKLGHSRASFDRLTICASRLYNKCTEY

SEQ ID NO: 2288 - protein, 245 aa, Nicotiana sylvestris
MGRGRVQLKRIENKINRQVTFSKRASGLLKKAHEISVLCDAEVGLIVFSTKGKLFEYSTDSCMERILERYERYSYAERQLTATDDETPGSWTLEHAKLKARLEVLQRNQRHYAGEDLDSLSMKELQNLEHQLDSALKHIRSRKNQLMHESISELQKKDKALQEQNNNLSKQVKEREKELAQQTQWEQQSHDHLNSSSFVLTQPLSSLHLGEAYPTAGDNGEVEGSSRQQQQNTVMPPWMLRHLNG

SEQ ID NO: 2289 - protein, 242 aa, Nicotiana sylvestris
MGRGKVQLRRIENKINRQVTFSKRRGGLVKKALEISVLCDAEVALIVFSHKGKIFEYSSDSCMEQILERYERYSYTERRLLASNSESSVQENWSLEYAKLKAKIDLQQRNHKHYMGEDLDSLSLKDLQNLEQQLDTSLKLIRSRKNQLMHESISMLQKKEKAIQEENNMLSKKIKEKDNTVGQQVEWHQQNQVPTSASFLLQPHPCLNIGGNYQEEREERRRNELDLNLDSLYPCHMGCFAT

SEQ ID NO: 2290 - protein, 199 aa, Oryza sativa
MRRGGAAEEDAEAARFRGVRKRPWGRYAAEIRDPAKKARVWLGTYDSAEDAARAYDAAARALRGAKAKTNFPLSLPHAQPQLHHHHHHHLTYPAAAVVAARPATSSLSSTGESFGTRPRPVLPPRPPPPPPIPDGDCRSDCGSSASVVDDECADAAASPSCRLPFQFDLNLPPGGGGGGGGGFGCAYDDEELRLTALRL

SEQ ID NO: 2291 - protein, 294 aa, Arabidopsis thaliana
MKRLSSSDSMCGLISTSTDEQSPRGYGSNYQSMLEGYDEDATLIEEYSGNHHHMGLSEKKRRLKVDQVKALEKNFELENKLEPERKTKLAQELGLQPRQVAVWFQNRRARWKTKQLEKDYGVLKGQYDSLRHNFDSLRRDNDSLLQEISKIKAKVNGEEDNNNNKAITEGVKEEEVHKTDSIPSSPLQFLEHSSGFNYRRSFTDLRDLLPNSTVVEAGSSDSCDSSAVLNDETSSDNGRLTPPVTVTGGSFLQFVKTEQTEDHEDFLSGEEACGFFSDEQPPSLHWYSASDHWT

SEQ ID NO: 2292 - protein, 75 aa, Brassica napus
VYDKDTPDRWQNVAKAVGNKSAEEVKRHYDILVEDLMNIEQDLVPLPKYKTVDVGNKSRGINDYDLRLMKNMRIQ

SEQ ID NO: 2293 - protein, 306 aa, Oryza sativa (japonica cultivar-group)
MAEKLLYPPPLLSHEEVANDRAAFMDTLRRFHSLMGTKFMIPVIGGKEMDLHALYVEVTSRGGLAKVMEERKWREVMARFSFPATTTSASYVLRRYYLSLLHHYEQVYFFRAHGALLRPAASALTKTPRRKMRGTSDQSPAAAEAGKRMALPERLGGEPCSFSVTGSIDGKFEHGYLVTVKIAAETLRGVLYRVAPPPPPPAAPPPPPPPARGRRRRGRRQRDPAQPRPNRSAYNFFFKEKHPELKATHPHREREYSRMIGDAWNRLAADDKMVYYRHSAEDKERYKREMQEYNERLKLAPSTMAG

SEQ ID NO: 2294 - protein, 223 aa, Oryza sativa (japonica cultivar-group)
MEVEAATRRFHLWLRGLRGLRRELRAARWADDPAQLGSLVGRFVAHVECYTAARAEMDPVWTLSAPWASPVERGAAYWLAGWRPTTLVHLLYTESGRRFEAQLPDLLLGVSSGNLGDLSPSQLAQIDDLQRRTVAEEDGLSREMALVQEGHGAVAVGGGIDVDGIVGRVRGVLGRADALRLRTVKRAVEILEPAQAAELLVAAADMEIGFREFGLKYSSARSD

SEQ ID NO: 2295 - protein, 225 aa, Brassica napus
MDSTHSEFNKRARLFEDHQNKDAKVIHPMIPESTTPLDKGYDASTTTQNLFNESKPEVATPKVLKKRGRRKKNPNPEEVNSSTPRGDDSENRSKFNESASARMRTVTAEERERAITAAKAYEPTNPFFRVVLRPSYLYRGCIMYLPSGFAEKYLSGISGFIKIQLGEKQWPVRCLYKAGRAKFSQGWYEFTLENNIGEGDVCVFELLSTRDFVLKVTAFRVNQYV

SEQ ID NO: 2296 - protein, 273 aa, Triticum aestivum
MIPAVACVGYDRTDAMEVPSPIKTGSWSPEEDALLVALVRQHGARRWSVISASVPGRTGKSCRLRWCNQLSPAVQHRPFTVQEDALIIAAQARYGNKWADIARLLPGRTDNSVKNHWNSNLRRCQRRAKAMAAATAARVAASSSSSGSAVRAKMQQEEQVMVMNRSPPAVVHGAVTAVIDDPMPMLSLTLSLGLPQMAADKASEEAKAKAKEKTPPPVGVGGNDVRLMAAIRQVVREEVERQAGQLLYSVVMATTAARVDGASSSDHPTNGHH

SEQ ID NO: 2297 - protein, 161 aa, Arabidopsis thaliana
MALIPPWTRDNDKRFELALVIFPEGSPYFLEYIAEFLQKPLEEVKYYYDAILVYDVVLIESGKYALPKYPEAYYVSLTEATESKHGETNQIPRIIPWTEEEHRYGKGAWSMISREFVTSTQVASHAQKYDKRQKLDSKKRKRWSVLDITLESTKGKSDFVK

SEQ ID NO: 2298 - protein, 389 aa, Oryza sativa (japonica cultivar-group)
MRGGGGGDAGTSSRGGGSGGAPARPRRFPEAAQPEIMRAAEKDDGYAAHVTEACRDAFRHLFGTRVAVAYQNEIKLLGQSLYYLLTTGSGQQTLGEEYCDISQVATSHGLPPTPARRILFILYQTTVPYLAERISSRIVARGIALEDSQLDDHSESDSSSIGTAAQPSPIRNSPSRSLSFSHLSRLRGRVHTLWEWVLRKWPSMLPFAQDFIQLTIRTNLMFFYFEGLYYHLPKRAAGIRYVFIGKPLNQRPRYQILGIFLLIQLCILGAERLRRSNLSTIASSINQISSGGYPSSRGRGVPVLNEDGNIISDIRHGKTADLATSSEASSGKSKCTLCLSTRQNPTATTCGHVFCWSCIMEWCNEKPECPLCRTPITHSSLICIYHSDF

SEQ ID NO: 2299 - protein, 85 aa, Oryza sativa (japonica cultivar-group)
MGSSEMAFGLYYHLPKRAAGIRYVFIGKPMIQRPRYQILGIFLLIQLCILGAERLRRSNLSTIASSINQISSGSYPSSRGGTFFF

SEQ ID NO: 2300 - protein, 281 aa, Nicotiana tabacum
MVRAPCCEKMGLKKGPWTPEEDQILVSYIQTNGHGNWRALPKLAGLLRCGKSCRLRWTNYLRPDIKRGNFTREEEDSIIQLHEMLGNRWSAIAARLPGRTDNEIKNVWHTHLKKRLKNYQPPQNSKRHSKNNLDSKAPSTSQTFNNSDNFSNIQEDINGPVTGPNSPQRSSSEMSTVTVDSTAMTTITIDDQNMFKQLDEMDSSENFIPEIDESFWTDDLSTSDNSTFGMEGTGGELQVQFPFSSVKQESMDMVGAKLEDDMDFWYNVFIKSGDLLDLPEF

SEQ ID NO: 2301 - protein, 251 aa, Brassica oleracea
MGRGRVEMKRIENKINRQVTFSKRRAGLLKKAHEISILCDAEVSLIVFSHKGKLFEYSSESCMEKVLEHYERYSYAEKQLKVPDSHVNAQTNWSVEYSRLKAKIELLERNQRHYLGEDLESISIKELQNLEQQLDTSLKHIRSRKNQLMHESLNHLQRKEKEILEENSMLAKQIRERESILRTHQNQSEQQNRSHHVAPQPQPQLNPYMASSPFLNMGGMYQGEYPTAVRRNRLDLTLEPIYNCNLGYFAA

SEQ ID NO: 2302 - protein, 307 aa, Antirrhinum majus
MEILAPSSYFSSSSWFLEESRSTTRWTAAENKAFENALAVFDENTPNRWERVAERVPGKTVGDVMRQYKELEDDVSSIEAGFVPVPGYSTSSPFTLEWGSGHGFDGFKQSYGTGGRKSSSGRPSEQERKKGVPWTEEEHKLFLMGLKKYGKGDWRNISRNFVITRTPTQVASHAQKYFIRQLSGGKDKRRASIHDITTVNLSDNQTPSPDNKKPPSSPDHSMAQQQTSSTSIHKLPFQWDQTSNETIMGFASSGHHGNMFQSNPFGMNSYGFKMQGQQMQRGGFCDTYLGSQNMAFQMQSGLHFPNA

SEQ ID NO: 2303 - protein, 242 aa, Glycine max
  misc_feature (238)..(238): Xaa can be any naturally occurring amino acid
STTSSGIFENPKTPSAETETSIPKSSTNGEKSEKSASEEKTLKKPDKVLPCPRCNSMETKFCYYNNYNVNQPRHFCKNCQRYWTAGGTMRNVPAGAGRRKNKNSSATVSHYRHIMFSEGLQGATLNAPNGLHNAVMTFGPDSPLCDTMASMLNIAERAQSCVPNGFHVTEPNSFVSYRKEEEEDGTSGHSTGVNSVATTSTLSHSGSHESLDKKVVEGFTPQFPYFPSAPWPYPIPPXTFFP

SEQ ID NO: 2304 - protein, 244 aa, Crocus sativus
MGRGRVELKRIENTINRQVTFSKRRGGLLKKANEISVLCDADVAIIIFSTKGKLSEYSTDARMESILERYDRYSCAERDIVAPDPDSQESWRDEYGRLKAKLEALQTSQRHLMGAQLDMLSAKELQQLEQQLENALKNIRSRKNQLLFDSISELLKKEKTLTTQNKDMEMKLIEKKKVKSMARQGQQYTESSSPPSLLIQDPFPSLTIGINPASGSSEEDNEARLLPPVNRNRLPPWMVRSANE

SEQ ID NO: 2305 - protein, 204 aa, Brassica napus
MKKLKLMDHSSCRRRYHDPPSQATARTLNNNNNNPKKKRVVKEDLDDEKIVSKHPTYRGVRMRQWGKWVSEIREPKKKSRIWLGTFSTAEMAARAHDVAALAIKGGSAHLNFPELAYQLPRPASADPKDIQAAAAAAAAAVAVDMEVETSTPSPVSSEPSSPATTALADDAFSDLPDLLLDVNHNIDGFWDSFPYEEPFFSGTY

SEQ ID NO: 2306 - protein, 618 aa, Saccharum officinarum
MKREYQDAGGSGGDMGSSKDKMMVAAAGAGEQEEEMDEMLAAVGYKVRSSDMADVAQKLEQLEMAMGMGGVGGAGATADDGFISHLATDTVHYNPSDLSSWVESMLSELNAPPPPAPRLASTSSTVTSGAAAGAGYFDLPPAVDSSSSTYALKPIPSPVVASADPSSTDSTREPKRMRTGGGSTSSSSSSSSSMDGGRTRSSVVEAAPPATQASAAANGPAVPVVVMDTPEAGIRLVHALLACAEAVQQENFSAADALVKQIPMLASSQGGAMRKVAAYFGEALARRVYRFRPTPDSSLLDAAVADFLHAHFYESCPYLKFAHFTANQAILEAFAGCRRVHVVDFGIKQGLQWPALLQALALRPGGPPSFRLTGVGPPQHDETDALQQVGWKLAQFAHTIRVDFQYRGLVAATLADLEPFMLQPEGDDKDEEPEVIAVNSVFELHRLLAQPGALEKVLGTVRAVRPRIVTVVEQEANHNSGTFLDRFTESLHYYSTMFDSLEGAGSGQSTDASPAAAGGTDQVMSEVYLGRQICNVVACEGAERTERHETLGQWRNRLGGSGFEPVHLGSNAYKQASTLLALFNGGDGYKVEEKDGCLTLGWHTRPLIATSAWRLAAP

SEQ ID NO: 2307 - protein, 442 aa, Saccharum officinarum
MRTGGGSTSSSSSSSSSMDGGRTRSSVVEAAPPATQASAAANGPAVPVVVMDTPEAGIRLVHALLACAEAVQQENFSAADALVKQIPMLASSQGGAMRKVAAYFGEALARRVYRFRPTPDSSLLDAAVADFLHAHFYESCPYLKFAHFTANQAILEAFAGCRRVHVVDFGIKQGLQWPALLQALALRPGGPPSFRLTGVGPPQHDETDALQQVGWKLAQFAHTIRVDFQYRGLVAATLADLEPFMLQPEGDDKDEEPEVIAVNSVFELHRLLAQPGALEKVLGTVRAVRPRIVTVVEQEANHNSGTFLDRFTESLHYYSTMFDSLEGAGSGQSTDASPAAAGGTDQVMSEVYLGRQICNVVACEGAERTERHETLGQWRNRLGGSGFEPVHLGSNAYKQASTLLALFNGGDGYKVEEKDGCLTLGWHTRPLIATSAWRLAAP

SEQ ID NO: 2308 - protein, 356 aa, Triticum aestivum
  misc_feature (181)..(181): Xaa can be any naturally occurring amino acid
  misc_feature (231)..(231): Xaa can be any naturally occurring amino acid
  misc_feature (241)..(241): Xaa can be any naturally occurring amino acid
  misc_feature (249)..(249): Xaa can be any naturally occurring amino acid
MKVLCSACEAAEARVVCCADEAALCARCDRDVHDANRLAGKHHRLPLLSAASNPPAVSAPNCDICQEGHAYFFCVEDRALLCRSCDVAVHTANAFVSAHRRFLLARPRGPRAPADQGEPVPEPEPEPQNRPTTPRSAPLSTTHVAPGRGAPRPLYSDGEHSTGRPAPNVGIPGGTCPDWPXIDGPFGSGTPGVRAPREPEVIQAPPEEEPPGGRSRRPRPALFGGSMPDWXPLDEFFGFTXFDSGFGFXENGTSKADSGRLSSPNRRSMSSSSSGTPAQNAQDFFGQVPEVHWSRSSMPELPSPPTASGLHWQGDPHGRPASDSAAVFVPDICSPENPFRCFTAGADQQLKRRRRC

SEQ ID NO: 2309 - protein, 106 aa, Zea mays
FWLKKKKEVVRTLEKDMPVGTYPLNFDDGRPTKLCDANRMQTPKNKTFFPEEAFRDFLSRGGGPFFRGYGGYKNVDTLDDLRPGVMYQGLRSLGDLFCNIYFGQTC

SEQ ID NO: 2310 - protein, 196 aa, Trautvetteria carolinensis
AGIMKKAKELTVLCDAEVSLIMFSSSGKCVDFISPTISQKEFYDKYQKITRDDLWKSQYDKMQEELKTLVEINRKLRREIGQRVGEDLDDLSIQELRSLEQDLRNTEKVVRQRKFGLLSSQGETQKKKVRNLAEINSNLWQEYQERSEEEYALANGMSALELGNGVAPHIYSFRLHPSQPNLHEDEEYEIHGLRLA

SEQ ID NO: 2311 - protein, 277 aa, Nicotiana tabacum
MGRAPCCEKMGLKKGPWTPEEDQILISFIQQNGHGNWRALPKQAGLLRCGKSCRLRWTNYLRPDIKRGNFTKEEEDTIIQLHEMLGNRWSAIAAKLPGRTDNEIKNVWHTHLKKKLKDYKPPQNPKRHSKNHDSKGPTTSESSNNSHLTFIYTQKHIIDSSVPAPNSPQISSSTEMSTVTLVDDHQMVIKQEEMESSEYFPEIDESFWTDKLSTDNNWSNTHDHVMVTADQELQVQLPFSSLKEENVDMLTTKMEDDMDFWYNVFIKTDDLPELPEF

SEQ ID NO: 2312 - protein, 229 aa, Oryza sativa (indica cultivar-group)
MGRGRVELKRIENKINRQVTFAKRRNGLLKKAYELSVLCDAEVALIIFSNRGKLYEFCSGQSMTRTLERYQKLSYGGPDTAIQNKENELVQSSRNEYLKLKARVENLQRTQRNLLGEDLGTLGIKELEQLEKQLDSSLRHIRSTRTQHMLDQLTDLQRREQMLCEANKCLRRKEKLEESNQLHGQVWEHGATLLGYERQSPHAVQQVYSRADEQLMRDCLHADMATLNS

SEQ ID NO: 2313 - protein, 313 aa, Glycine max
MNTRKDMDRIKGPWSPEEDEALQKLVEKHGPRNWSLISKSIPGRSGKSCRLRWCNQLSPQVEHRAFTHEEDDTIIRAHARFGNKWATIARLLHGRTDNAIKNHWNSTLKRKCTSTMIDDDNTPPLKRSLSAGAAIPVSTGLYMNPPTPGSPSGSDVSESSVLVASSSHVFRPVPRTGAVLPPVETTTTLSSNDPPTSLSLSLPGVDSSEVSNRTTEPIHAAPPPPPQPQPQPQPLNTIPLLPMMTVPSVSPTGMAPFNFSAEFLAVMQEMIRKEVRSYMELHNQKNGMCFQAAVNDGFRNASVKRIGISRVDS

SEQ ID NO: 2314 - protein, 236 aa, Arabidopsis thaliana
MEWSTTSNVENVRVAFMPPPWPESSSFNSLHSFNFDPYAAGNSYTPGDTQTGPVISVPESEKIMNAYRFPNNNNEMIKKKRLTSGQLASLERSFQEEIKLDSDRKVKLSRELGLQPRQIAVWFQNRRARWKAKQLEQLYDSLRQEYDVVSREKQMLHDEVKKLRALLRDQGLIKKQISAGTIKVSGEEDTVEISSVVVAHPRTENMNANQITGGNQVYGQYNNPMLVASSGWPSYP

SEQ ID NO: 2315 - protein, 203 aa, Zea mays
MDGATSPFEGESALSSGLPDYAKKAMPAERIAELALIDPKRAKRILANRQSAARSKERKVKYTSELEKKVQTLQTEATTLSAQLTLLQRDTTGLTAENRELKLRLQSMEEQAKLRDALNETLREEVQRLKIAAGQVGNMNGNPFNGGLQQQIPSYFVQQQQMSYFGGHQAQAQHHSQNHHHRSPSNGRQSPSDQSLNDSMDFV

SEQ ID NO: 2316 - protein, 282 aa, Brassica napus
MGSLRGNVEEPISQSLPRQNSLYSLKLHEVQNHLGSSAKPLGSMNFDELLKNVWSAEATNQPREATEAGLSRQGSLALPRGLSKKTVEEVWREIQHDKNGSSGNPHGERIDNNNNNKQPTLGEITLEDLLLKAGVVTETVLPQTVVNVASNEPWVQYHHPQHQQQGFMPYPVCEMQEMVSPMNMMMGDAPQAHGRKRVAPSGGDIVERVVERRQKRMIKNRESAARSRARKQAYTHELEIKVSSLEEENEKLRRLKEVEKILPSEPPPDPKWKLRRTSSASF

SEQ ID NO: 2317 - protein, 246 aa, Sisymbrium irio
MLKSVNPMAFYELGEQQFPTLGYIVSKPGNAGAYEIDPPIPSVDDAIYGSDEFRMYAYKIKRCPRTRSHDWTECPYAHRGEKATRRDPRRYSYCAVACPAFRNGACHRGDTCEFAHGVFEYWLHPARYRTRACNAGNLCQRKVCFFAHAPEQLRQSEGKHRCRYAYRPVRTTAARGRNGDGVGMRLDGDDFDTWQSPVKSGKSDLDINEERVLKCWSGISIVDDHYEPSDLDLDLSHIDWISELVD

SEQ ID NO: 2318 - protein, 289 aa, Brassica napus
MDYDASRIGEIVEDEEQIDLPPGFRFHPTDEELITHYLKQKVFNTFFSATAIGEVDLNKIEPWELPRKAKIGEKEWYFFCVRDRKYPTGLRTNRATEAGYWKATGKDKEIFKGKSLVGMKKTLVFYKGRAPKGVRTNWVMHEYRLEGIYSIQHLSQTAKNDWVICRVFHKRADGTKVDMSHLMLLDSHVNRIEPVGLPSLMDSSQRDSFPGSSTHVTCFSDQETEDKRLIHLESKDGSGPLFYPDPLFLTDNDSLMKLLLNSHETQFPGTGTDPSALAGMGESGCFWNF

SEQ ID NO: 2319 - protein, 366 aa, Arabidopsis thaliana
MGRHSCCYKQKLRKGLWSPEEDEKLLTHITNHGHGCWSSVPKLAGLQRCGKSCRLRWINYLRPDLKRGAFSPEEENLIVELHAVLGNRWSQIASRLPGRTDNEIKNLWNSSIKKKLKQRGIDPNTHKPISEVESFSDKDKPTTSNNKRSGNDHKSPSSSSATNQDFFLERPSDLSDYFGFQKLNFNSNLGLSVTTDSSLCSMIPPQFSPGNMVGSVLQTPVCVKPSISLPPDNNSSSPISGGDHVKLAAPNWEFQTNNNNTSNFFDNGGFSWSIPNSSTSSSQVKPNHNFEEIKWSEYLNTPFFIGSTVQSQTSQPIYIKSETDYLANVSNMTDPWSQNENLGTTETSDVFSKDLQRMAVSFGQSL

SEQ ID NO: 2320 - protein, 519 aa, Lotus japonicus
MTMEPNSTTSDHILDWLEGSVSFFPSFLDEPCNNSGYIQEYHLWDQYQTDANTGSSPNATNSTTATIVATSATSTTSLEPCGSNNNQPLSDLPKKRNATDESSLKPPQNKNKRIKTRPMNEPENGDAVRKNKKGGAKANGSNCNSGNSKEGRWAEQLLNPCAAAIAGGNVNRVQHLLYVLHELASPTGDPNHRLAAHGLRALTHHLSSSSSSPTSSGTITFASTEPRFFQKSLLKFYEVSPWFSFPNNIANASILQVLAEEANITSRTLHILDIGVSHGVQWPTLLDALSRRSGGPPSVVRLTVVTAENDQNMETPFSKAPPGYNYYPRLLGYAQSININLQINRIENHSLQTLNAQSISASPDEILIVCAQFRLHHLNHNSPDERSEFLKVLRNMEPRGVILSENNTECCCSGCGNFAAGFTRRVEYLWRFLDSTSSAFKGRESDERRVMEGEAAKALTNQREMNEEKEKWCGRMKEAGFAGEVFGEDAVDGGRALLRKYDSNWEMKVEEKNTSVGLW

SEQ ID NO: 2321 - protein, 188 aa, Saccharum hybrid cultivar
SSVVTAAAAIQADPAEKPRAPKAQVVGWPPVRSFRKNIMSVQSDKGAGGSKDADKSSPPPAAAAAVGGAAFVKVSLDGAPYLRKVDLKMYKMYKSYQELSKALEKMFSSTIGSCGSQGMNGMNESKLVDLLNGSEYVPTYEDKEGDWMLVGDVPWEMFVESCKRLRIMKGSEAIGLAPRAMEKCKNRS

SEQ ID NO: 2322 - protein, 509 aa, Cucumis sativus
MAKKDDSATRPPLQRPTITLPPRPSMEAFFTGVPTGVSPGPMTLLSSYLADFADGAVDSPSFSQLLAGAMASPMAMGFFGTGSTPNYYAKDGPASELEFGMKQSKPVNLVVARSPLFSVPPGLSPSGLLNSPGFYPPQSPFGMSHQQALAQVTAQAALANSHMHMQQAEYQHSSVPAPTEPLVRDPSFSLDDASQLAIIPSTSDTKSLIAESTEVSHSDRKYQPPPPPHGSDKPADDGYNWRKYGQKLVKGSEFPRSYYKCTHLNCPRKKKIEGLPDGEITEIIYKGQHNHEPPPANKRARDNIEPAGCTNSLIKPECGLQNQAGILNKSSENVQLGSSDSEGRADTEITDDRDEDEPNPKRQNIDAGTSGVALSHKTLTEPKIIVQTRSEVDLLDDGYRWRKYGQKVVKGNPNPRSYYKCTSAGCNVRKHVERSSTDSKAVVTTYEGKHNHDVPAARNSSHHTVNNTVHHIKPLKVVAQKHPLLKEMEFGTNDQRPAVLQLKEEQITV

SEQ ID NO: 2323 - protein, 235 aa, Chloranthus spicatus
  misc_feature (108)..(108): Xaa can be any naturally occurring amino acid
MGRGRVQLKRIENKINRQVTFSKRRSGLLKKAHEISVLCDAEVALIVFSAKGKLSEYSTDSRMDRILERYERISYAERELRSTDHRPDGNWNLEYSKLKAKLEGLQRXQRHYMGEDLEKLSLKELQPLENQLDNALKHIRTRKTQVMMDSIAELQAREKLLQEQNSMLEKKIQEKNALAHQAHWEQQNQTQSPPPFLLTHQHPTINNSTYQARGEEDRVRTNSLMPPWMLRHVNG

SEQ ID NO: 2324 - protein, 230 aa, Polaromonas sp. JS666
MHELTIPKNYPVSKNQAAASPSALSSLAPEGASGADGRRIQTRRSGVHGKGVFALQDLAEGETLIEYVGEVVTWKEALRRHPHDPKDPNHTFYFHIDEKHVIDAKYGGNSSRWINHSCKPNCEADEDEGRVFIKALRNIKAGEELFYDYGLIIDAKYTKKLKAEYPCWCGAKNCRGTLLAPKDKDNGKNAAKDKPKAKDKASDRADGKAKAKTKLDSKKSQAKKNKKKKD

SEQ ID NO: 2325 - protein, 377 aa, Oryza sativa (indica cultivar-group)
MSPPPPYYHHLLLLRSSSTTTGGGARVLAAAELARMKLLCSACEAAEASVLCCADEAALCARCDRDIHAANRLAGKHLRLPLLSPASSSSSSTAALAPPPPSPPKCDICQESHAYFFCLEDRALLCRSCDVAVHTANAFVSAHRRFLLTGVQVGQEQDEHSPDPPEPSPPPPPPPPASKSDHPAPLYGEGGGGFSWDAADSPAAGGLPDWSAVVDQFGSPPPPRHTDTATVTTPPPTKRSPRAPAFGGQGGMMDWPLGEFFGGFTDFTGGFGFGFGDSGTSKADSGKLGGSTDGSPYYRSSSEDDRNADELFGQVPEIQWSVPELPSPPTASGLHWQRHPAATHGGGGGGPDTTAFVPDICSPDSCFPATTSKRRRQ

SEQ ID NO: 2326 - protein, 150 aa, Oryza sativa
  misc_feature (85)..(85): Xaa can be any naturally occurring amino acid
  misc_feature (107)..(107): Xaa can be any naturally occurring amino acid
SCRYGRNSGDHASGPSAVARRCLPNSTLSSLSGKRGAPSATTTAGGGSDNEDSGGGYRKKLRLSKDQAPVLDDTFKEHNTVNPKXRRRWLARQLNLKQPQVEVWFQXRRARTKLRQMEVDCELRAAPAAAAPATAAPCSPPAAGRRGREE

SEQ ID NO: 2327 - protein, 121 aa, Glycine max
MGNQKQKWTQDEEDALIAGVEKHGPGKWKNILKDPQFAPFLTSRSNIDLKDKWRNLSVSNGAQGSKEKSRVPKLKALPAPPAPTATPQNAAPALQNAASDVTPPDASQNDQDAKNPPRASI

SEQ ID NO: 2328 - protein, 91 aa, Ostreococcus tauri
MTSGSARGGTRGRRARVRVRAGTGAGGGRDANASGGRGTCAVCLDAYVLPTTTRCGHVFCARCLQAALRHSSQCPTCRKKVTKSSCVRVFL

SEQ ID NO: 2329 - protein, 236 aa, Oryza sativa (japonica cultivar-group)
MAQQARAQWPQKQNKLFEQALAVYDKETPDRWHNIARAVGGGKSAEDVKRYYEMLEEDIKHIESGKVPFPAYRCPAAAGYQAESRPSTAAEPSRLPLSDSGLSGIRPTQYPPDGELSPPRHRLRRRGNQPIPSYKPSPSREGIFYWEVVVAALKSRGTGATSTPWIRLLLPGLTVCRLLGSSGCFDAWMLSTARLMVVNTYWMSYLTRSPEFHLNFPHINLRKYEVVCVQPGFMQE

SEQ ID NO: 2330 - protein, 238 aa, Arabidopsis thaliana
MALETLTSPRLSSPMPTLFQDSALGFHGSKGKRSKRSRSEFDRQSLTEDEYIALCLMLLARDGDRNRDLDLPSSSSSPPLLPPLPTPIYKCSVCDKAFSSYQALGGHKASHRKSFSLTQSAGGDELSTSSAITTSGISGGGGGSVKSHVCSICHKSFATGQALGGHKRCHYEGKNGGGVSSSVSNSEDVGSTSHVSSGHRGFDLNIPPIPEFSMVNGDEEVMSPMPAKKLRFDFPGKP

SEQ ID NO: 2331 - protein, 218 aa, Sisymbrium irio
MAAFEESTDLDAIQGHLFEDFMVSDGFMGDFDFNASFVSGLWCIEPVMNQVPKQEPDSPVLDPDSFVKEFLQVEAESSTSTGTTELNSSSQETDQSISTRKKSKRFEEQEEEEPRHYRGVRRRPWGKFAAEIRDPAKKGSRIWLGTFESDVDAARAYDCAAFKLRGRKAVLNFPLDAGKYEAPANSGRKRKRSDVQGELQRSQSNSSSSSSDGETTCE

SEQ ID NO: 2332 - protein, 264 aa, Capsicum annuum
MCGGAILADIIPRRDRRLSSTDLWSICSDDFWPNSSFSKPFSTQNVSPAKPKRTQPSAGNEQIQKAKKRQRKNLYRGIRQRPWGKWAAEIRDPRKGVRVWLGTFNTAEEAARAYDKEARKIRGEKAKVNFPNEDDHYSYPEPPPLAAYNNTTFYNNCYAFENNEPVIEYAIANNNDQNGLIKEVENMNGRVVEEEEKTEIQVQKLSEELMAYESLMKFYEIPYVDGQSVAAMANPAAEAVLGGGLMELWSFDDVSRQQPSYNVV

SEQ ID NO: 2333 - protein, 154 aa, Zea mays
MDHGFDGALQLPPGFRFHPTDEELVMYYLCRKCGGLPIAAPVIAEVDLYKFEPWRLPEKAAGGGPDAKEWYFFSPRDRKYPNGSRPNRAAGTGYWKATGADKPVGSPRPVAIKKALVFYAGKPPKGVKTNWIMHEYRLADVDRSAAARKKSNNA

SEQ ID NO: 2334 - protein, 343 aa, Oryza sativa (japonica cultivar-group)
MESGRLIFSTAGSGAGQMLFLDCGAGGGGVGGGAMFHRGARPVLGMEEGGRGVKRPFFTTPDELLEEEYYDEQLPEKKRRLTPEQVHLLERSFEEENKLEPERKTELARKLGLQPRQVAVWFQNRRARWKTKQLERDFDRLKASFDALRADHDALLQDNHRLHSQVMSLTEKLQEKETTTEGSAGAAVDVPGLPAAADVKVAVPDAEEPALEEAAAAFEEQQEQQVKAEDRLSTGSGGSAVVDTDAQLVVGCGRQHLAAVDSSVESYFPGGDEYHDCVMGPMDHAAGGIQSEEDDGAGSDEGCSYYADDAGVLFADHGHHHHHQHADDDEEDGQQISCWWMWN

SEQ ID NO: 2335 - protein, 129 aa, Zea mays
MDPFHHLSSSFMTIHYHPLLSPSPPHFPLPPPPPQLPSVSAASSASLERERLPQWSHAETAAFLAVRADLDHSFLTTKRNKALWEAVSARLHAQGFARTPDQTTHARPTPTRSSSVVHKLKKASYLHHA

SEQ ID NO: 2336 - protein, 362 aa, Oryza sativa (japonica cultivar-group)
MVTSKEFARDQAAMDQKIKSDVGEVVLAGDEEEDGDVVLPGFRFHPTDEELVTFYLRRKVARKSLSIEIIKEMDIYKHDPWDLPNASTVGGEKEWYFFCLRGRKYRNSIRPNRVTGSGFWKATGIDRPIYSAAVNSNSGESIGLKKSLVYYRGSAGKGTKTDWMMHEFRLPPAIAAADASPCMQEAEVWTICRIFKRSITYRKQQQQQAWRPPATVTVKAPPPGDSSSNTGSFESDGGGDEFMNCGLTPAISQQQQHGGRHQMMSTMSCNGGYFFNDGIHHSHSHHKLHSQWGSLQMAPPEPKPEPEQKPLSSPAMTIAFHQNDHGFPAAAADFYKDGYLEEIARMMEVADPSPTGFYDCRY

SEQ ID NO: 2337 - protein, 243 aa, Glycine max
MGRGRVELKRIENKINRQVTFAKRRNGLLKKAYELSVLCDAEVALIIFSNRGKQYEFCSGSSMLKTLERYQKCNYGAPEDNVATKEALVLELSSQQEYLRLKARYEALQRSQRNLMGEDLGPLSSKELESLERQLDSSLKQIRSIRTQFMLDQLSDLQRKEHFLGESNRDLRQRLEEFQINPLQLNPSAEDMGYGRHPGQPQGHALFQPLECEPTLQIGYHPDPVSVVTEGPSMNNYMAGWLP

SEQ ID NO: 2338 - protein, 295 aa, Arabidopsis thaliana
  misc_feature (140)..(140): Xaa can be any naturally occurring amino acid
METLHPLLSHVPTSDHRFVVQEMMCLQSSSWTKEENKKFERALAVYADDTPDRWFKVAAMIPGKTISDVMRQYSKLEEDLFDIEAGLVPIPGYRSATPCGFDQVVSPRDFDAYRKLPNGARGFDQDRRKGVPWTEEEHRXTKFSIFVILVSLFFGVLSCKLLCFLGLLRPCLIVFCRRFLLGLLKYGKGDWRNISRNFVGSKTPTQVASHAQKYYQRQLSGAKDKRRPSIHDITTVNLLNANLSRPSSDHGCLVSKQAEPKLGFTDRDNAEEEVMFLGQNLSSVFSITNFILSRH

SEQ ID NO: 2339 - protein, 187 aa, Glycine max
  misc_feature (98)..(99): Xaa can be any naturally occurring amino acid
  misc_feature (101)..(104): Xaa can be any naturally occurring amino acid
  misc_feature (107)..(108): Xaa can be any naturally occurring amino acid
  misc_feature (110)..(110): Xaa can be any naturally occurring amino acid
  misc_feature (112)..(113): Xaa can be any naturally occurring amino acid
  misc_feature (117)..(117): Xaa can be any naturally occurring amino acid
  misc_feature (119)..(120): Xaa can be any naturally occurring amino acid
  misc_feature (122)..(124): Xaa can be any naturally occurring amino acid
  misc_feature (127)..(127): Xaa can be any naturally occurring amino acid
  misc_feature (132)..(133): Xaa can be any naturally occurring amino acid
  misc_feature (135)..(138): Xaa can be any naturally occurring amino acid
  misc_feature (140)..(141): Xaa can be any naturally occurring amino acid
  misc_feature (145)..(145): Xaa can be any naturally occurring amino acid
  misc_feature (147)..(149): Xaa can be any naturally occurring amino acid
  misc_feature (151)..(152): Xaa can be any naturally occurring amino acid
  misc_feature (155)..(155): Xaa can be any naturally occurring amino acid
  misc_feature (158)..(158): Xaa can be any naturally occurring amino acid
  misc_feature (160)..(163): Xaa can be any naturally occurring amino acid
  misc_feature (165)..(165): Xaa can be any naturally occurring amino acid
RRFKGRLGLSLSLSFPLLSSSPSSHNPQKPSWNDPIFTSSGEAGSFLRGIDVNRLPSVVDCEEEAGVSSPNSTVSSVSGKRSERETNGEENDTDRACXXGXXXXTKXXAXTXXKKLXLXXDXXXVLXEESWXXHXXXXPXXKLGXGXXXWXXAAXQVXGXXXXTXRRGGSGGRGWRGGGGGGGGGGP

SEQ ID NO: 2340 - protein, 341 aa, Arabidopsis thaliana
MEGGGRGPNQTILSEIEHMPEAPRQRISHHRRARSETFFSGESIDDLLLFDPSDIDFSSLDFLNAPPPPQQSQQQPQASPMSVDSEETSSNGVVPPNSLPPKPEARFGRHVRSFSVDSDFFDDLGVTEEKFIATSSGEKKKGNHHHSRSNSMDGEMSSASFNIESILASVSGKDSGKKNMGMGGDRLAELALLDPKRAKRILANRQSAARSKERKIRYTGELERKVQTLQNEATTLSAQVTMLQRGTSELNTENKHLKMRLQALEQQAELRDALNEALRDELNRLKVVAGEIPQGNGNSYNRAQFSSQQSAMNQFGNKTNQQMSTNGQPSLPSYMDFTKRG

SEQ ID NO: 2341 - protein, 165 aa, Medicago truncatula
MAERSKAPVLRTGPRERAWVQNPLLTFLFFYFHHSIYFDSLFHIPDNHCYGSSTSRINYDVACLYYHIFCLHCGEEAHTPVDCETVTRWMKKKNSDFQITTTTTRIIANTKPCPKCKIHIEKNNEIYKCFVSPSTFNLIQIQSVFSTILRQLHYALCPYIIHGYT

SEQ ID NO: 2342 - protein, 119 aa, Metrosideros excelsa
NKINRQVTFSKRRCGLLKKAHEISVLCDAEVALIVFSTKGKLFEYATDACMEKILERYERYSYAERQILTNNAETNGNWTLEHAKLKARMEILQKNQKNLMGEELDSLSLKELQNLEHQ

SEQ ID NO: 2343 - protein, 214 aa, Aquilegia formosa
HGNKWKKIAAEVPGRTAKRLGKWWEVFKEKQQREQKENNKAPEPIEEGKYDSILETFAEKLVKECPNPPFLMATSNGGFLHSDPPAPPPTMLPPWMASSNGTTVRPSSPSVTLTLSPSTVTPPPSIPWLQSADRGAAENPSLGLGSLSSHGSGSTGGDNHMVADLVECCRELEEGHRAWVAHKKEAAWRLKRVELQLESEKACRRRDKMEEIEA

SEQ ID NO: 2344 - protein, 225 aa, Vitis vinifera
MGRGKIEIKRIENPTNRQVTYSKRRNGIFKKAQELTVLCDAKVSLIMFSNTGKFHEYTSPTITTKKVYDQYQKTLGIDLWSSHYERMQENLRKLKEINNKLRREIRQRMGEDLGDLSIEDLRGLEQKMDASLGLVRERKYHVIKTQTETYRKKVRNLEEQHGNLLLNFEAKCDDPHYGLVENDGDYESAVAFANGASNLYAFRLHQAHPNLHHDGGYGSHDLRLA

SEQ ID NO: 2345 - protein, 409 aa, Oryza sativa (japonica cultivar-group)
MAAAASSSTTSAAAAPATATTTVAFSFQHPTPTPSCEEGDHRGRPQMGNKGEAAAAMGAMGINDAGNNTAAAAAAQHHLGVGAVRMKKVGGGGGGGGKARRKVREPRFCFKTMSDVDVLDDGYKWRKYGQKVVKNTQHPRSYYRCTQDNCRVKKRVERLAEDPRMVITTYEGRHVHSPSRDDDDAARASAEMTFICPLNRRNVPYGALLNSYGMPHFMIIVQIAFSTIYVVLVLLVAVTHVDSSLQGVYFGGNSSSAAAAAASQMSNQILIEFNQIYYFRFEFLKNHLNSSLMLTNFELARNQKTSSQISMGFPRNCISWLDTLLQPSPSTHASHLPPRGQLVASVDACGPSDADRIFPLRSTARETRSRGNINSSDLMDLSAIAIAHCISTKQPNHKVGASRERKKER

SEQ ID NO: 2346 - protein, 231 aa, Vitex negundo var. cannabifolia
HGNKWKKIAAEVPGRTAKRLGKWWEVFKEKQLKQALQKNHLDYGGGSAVPGSAASPEKAAQGKYDHILDTFAEKYVQPKLLSFQSPSNLIMPAANLSIPEPPPVPSLGSVSINTEAGNSGCTSLPPWMNMITTPTATSSLTSSSSTPSPSVSLTLSPSEPAVLDPETGVAPRFFPVQQVGVLIQHCKEVEEGRENWMRHKKEATWRLNRLEQQLESEKSRRRKEKMEEIEA

SEQ ID NO: 2347 - protein, 208 aa, Phytolacca americana
KRRNGLLKKAYELSVLCDAEVALVVFSSRGRLYEYANHSVKGTIERYKKACSDQSGAGSVAEANAQYYQQDSAKLRNQIRTITENNRLLSRHMMGEGLSSLTMKELKNLEGKLERGISRIRSKKNELLFAEIEFMQKREIELHNNNQFLRARIAENERAQQSMSLMPGGGDYELVPSQSFDSRNYFQVNALQPNNQYSRQDQTPLQLV

SEQ ID NO: 2348 - protein, 490 aa, Ostreococcus tauri
MSAMRCAGGRGGGTWVDADARGEAEGAAASTRATRDERRIRGVGGGGRRARDRGVGDRRVGGSGARACAGTGGWGAAGRDERLTGAFRATQEGKGDKQSKKATTSQYRGVRQRPWGRYFLTTFCAIDSWAAEIRDPNRGARLWLGTFDTAEEAARAYDAAARHIRGPNAKTNFQLAPGEEPPPFVLPEPPSGGRGMGGGAGGGGRGRGSDMGLPSTGYGGAGPSRQPNMMKKQKPVKGGVSTIYGFGTPTGEKSGVPKRGSIGFGSGIDLSALANANLALANQNLASAGSARKESESGFMKLFANGSLGDTPSSTGGSPLIMPESIEFRDGIFGMSGEIPVISTKRDRGPSSAFFGTSFGVAGSFGSMFPPDMGLSSTPDAGDGSNFSGFPMSPNTGIDGDFNVGSLGTIGDLGDALPAVGSFELGSPVDLDSMMNSMSRNSGGKAQPMASILGKPKKQEHDSPLGRASTRSSRDTRSKSAQLDALSALK

SEQ ID NO: 2349 - protein, 235 aa, Schefflera actinophylla
HGNKWKKIASEVPGRTAKRLGKWWEVFKEKQLRDLQKTHHHQDFSGLPAASSVSGGGSPEKALQGKYDHILETFAEKYVQPQHFAFQSLPASIMPNISLPELPPVLSPGSVPISPVNSSTRTGSALPPWMNSTNMGGSTLTSLSSSSSTPPPSVSLTCSPTEPVVLDPVQSEICLTGRFFQVQQLGTLVQYCKELEEGRQNWIQHKNEATWRLNRLEQQLESEKARKRREKMEEI

SEQ ID NO: 2350 - protein, 192 aa, Thalictrum dioicum
KRRNGLLKKAYELSVLCEAEIALVVFSNRGRLYEYANNSVRKTIDRYKKTCGEGSSTLTVSEANLLFYQQESSKMKQQIEILQNSNRHLMGEALSCLSIKELKQLESRLEKGLSRIRSKKNEMLLAEIEYMQKKEIELHNDNIYLREQITVNEKAQQHINSMPGNVYEAITSAPYNSKPNQYGSDATFLQLC

SEQ ID NO: 2351 - protein, 210 aa, Acacia hindsii
HGNKWKKIASEVPGRTAKRLGKWWEVFKEKQQREKKQISKTVDPIYDRKYDHLLETFAEKLVNERPSSSYLMTASNGAFMHTDVPSSASTSLPPWLSNSNTSKVVRPPSPSVTLGLSPSTVVAPPFPWLQPERGPGNAPLILGNVTPHGPVPAFGDNMLISELFECARELEEGHQAWAAHKKEAAWRLSRVELQLESEKACRRREKMEEI

SEQ ID NO: 2352 - protein, 226 aa, Thalictrum dioicum
MGRGKIEIKRIENTTNRQVTFCKRRNGLLKKAYELSVLCEAEVALVVFSSRGRLYEYSNNSVKKTIERYKKASTDSPNSGSVYEANVQFYQQEASKMRNQIASLQNHNRNLLGESLSNLNIRELRQIEKKIEGGISKIRAKKNELLFSEIEYMQKREIDLQTDNKYLGAMIAANERVPPEHMNLMPANEYHIMSSAPFDSRNFLPANLLDHNNNYSHSDQTTLQLG

SEQ ID NO: 2353 - protein, 837 aa, Magnaporthe grisea 70-15
MASHGACTIDSPQGPPKHALTPKQRSSILDSHSTDTDGPGATAAATNFTIAFNNVFRGNLTLHEVLSLEETVEIVMDTRTRIRDAAARSNAQEELPDESLVKTVGAWLTSYTSQGCLICFRHSCEHGEYLGDNSKRPFSIDLLGGMEVMLKSRLVEEAEKNHTHREPGRPRNCSRKCYVSYQTGNREIPSRQWNIEERMILRCLFLVLNTSDQPITVAAQCVVAEILDINCFEVHREVIRLRLERPQELHGPVGSELENNKRVKVLDWYDKNRKMLMGDWKQHTRLFESARFEGFDPCIHDGPCTVANGCNCAKLGVFCERFCRCTAESCALKFTGCACHASGGGKTCLSRQREGRPCICVQLNRECDPVLCGGCGAKERGDPKNAFNETLHRTGCQNCPLQRGVHKPLCLGESGIEGCGYGLFTAVDIAADEFIIEYVGELIQHDEGVRREARRGNVFDEESNVSYLFTLLEDDGIWVDAAVYGNLSRYMNHASESDRNSCNVVPKIVQVNGDFRIRFTALRDIKAGEELFFNYGENFPNLTKQRRNEADEERNAASKPAQGAAKVDGEYRTPGNKQRRVANKTPGPKPRGKRGGARPGAGRKPNSAKLALAQAAAAKQKKKPCPKPRSGGVTGANGARKSISSVVKPSDPVDVGYETEAAAPYFALKDDHKEDEDHGDNDDGEYRGPRTAAGASGTSEQNSSQKRSTAATSRLRKRKFEGENGDDDDDGEYAGTTNNDDARSSSEGGNVAVATTRPSTRRSGAGATRMRAANARLVSVSISPTGTRRNRPDPMNVDYTEVMDSSVEDEDDDEDVDDVLDRSRRRRQPPVRYRRGP

SEQ ID NO: 2354 - protein, 225 aa, Pachira aquatica
HGNKWKKIAAEVPGRTAKRLGKWWEVYKEKQLKQLQKNQGGRKEFSPQGSCSTVAPVVSSSPGQYDHILETFAEKYVLSNYSAMNLPPIMAPTISLPDPDPDPVLSLGSGSSGTATTSSSVVLPLWMNHNHTTASSLSSSTSSTTPSPSVSLSLSPGEPGLDPDLIRSCRLKLVRWVQYCKELEEGRQSWMQHKKEATWRLSRLEQQLEAEKARKRKEKMEEIEA

SEQ ID NO: 2355 - protein, 247 aa, Arabidopsis arenosa
MLKSVTPMAFYDIGEQQYSTFGYIVSKPGNAGAYEIDPPIPNIDDAIYGSDEFRMYAYKIKRCPRTRSHDWTECPYAHRGEKATRRDPRRYTYCAVACPAFRNGACHRGDSCEFAHGVFEYWLHPARYRTRACNAGNLCQRKVCFFAHAPEQLRQSEGKHRCRYAYRPVRARGGGNGDGVTMRMDGEDYDTSRSPVRSGKDDLDSNEEKVLLKCWSRMSIVDDHYEPSDLDFDLDLSHFDWISELVD

SEQ ID NO: 2356 - protein, 200 aa, Houttuynia cordata
NGLLKKAYELSVLCDAEVALVVFSSRGRLYEYANNSVKATIERYKKSNADSTNSGSVAESSSQYYQQESAKLRNQISQLQNAIGRLTPEGIASMNPREVTNAEKEILRSITKIRSKKNEVLSAEIEYMQKREIDLQNDNIYLRSKIAENERVHQHMNVMPGQQYEVMPAHPFDSRNFLEANLLEPNLHYSQQEQTALQLG

SEQ ID NO: 2357 - protein, 321 aa, Antirrhinum majus
MVRSPCCDKVGVKKGPWTVDEDQKLLAYIEEHGHGSWRSLPLKAGLQRCGKSCRLRWANYLRPDIKRGPFSLQEEQTIIQLHALLGNRWSAIASHLPKRTDNEIKNYWNTHLKKRLTRMGIDPVTHKPHTHNILGHGQPKDVANLNHIAQWESARLQAERRLVRESRLAQNNNKIGTIQRRLTWPLCLDNEQSNHYHSALLNSTSAVGLNQDNSFTNYSARPDNNNIYDDYEVNNIMGMIEFNNNSNYFADSLRLPGFVEGITDISSSNIVLGAGVLPSNSDNVVGYFEENWSSVLNNVASSSSMDSPDVLVNASSSYKMY

SEQ ID NO: 2358 - protein, 253 aa, Oryza sativa (japonica cultivar-group)
MDQIYMAAVNNKTSLPDDEPMKKISGDMPVTAGNACFDCNICLDFAAEPVVTLCGHLYCWPCIYEWLCPGVGSTASNNSSLARRQCPVCKATLSPDMLVPLYGRGGSLKKSLNGVPIPRRPTVQREAVEHQNTHNNIDDRHHENMEPSPPPQPLRHSSHHSSATEFDFIYPPSPIGRGLIHSTAGGVLGGMAVAVLPWAFRGQVPPSMFMSPHYVTAHNMSSRARRHQMEVERSLHQIWFFLFVFVVLCLLLF

SEQ ID NO: 2359 - protein, 298 aa, Zea mays
MISGNLNNEELGGGGCTKAEGPGAAGGAGAVVAKSPVLSSSRHWPPSTESRIVRVSRVFGGKDRHSKVRTVKGLRDRRVRLSVPTAIQLYDLQDRLGLSQPSKVVDWLLDAAQDEIDKLPPLQFPPQGQDLVAHLPPSMVAPFANVAADRAAAAAAAANASAAMAEGGKRHCHGGIKGLMGMGLNNSIGLANATMPLAHGLYYTPGESWTNGGNAAVHDHQVSHGGTSPQTVAHHSPFSSLLSLAAPGPQLVFYSPEGGGFAMKEATDHQFAVDSLDHSQGQLSLSSARSFLHPGNQG

SEQ ID NO: 2360 - protein, 216 aa, Sanguinaria canadensis
IENTTNRQVTFCKRRNGLLKKAYELSVLCDAEVALIVFSNRGRLYEYANNSVKSTIERYKKTCQDPSNSGCAVEANTQFYQQEASKLRQQIGFLQNSNRNLTGEALSSMTVKELKQLETRLEKGISRIRSKKNELLFSEIEYMQKREIDLQNDNMYLRAKIAENERAQQHMNLMPGNEYDVMTSSAYDSRNFLQVNLLESTNHHYSRQEQTALQLG

SEQ ID NO: 2361 - protein, 623 aa, Triticum aestivum
MKREYQDAGGSGGGGGGMGSSEDKMMVSAAAGEGEEVDELLAALGYKVRASDMADVAQKLEQLEMAMGMGGVGAGAAPDDSFATHLATDTVHYNPTDLSSWVESMLSELNAPPPPLPPAPQLNASTSSTVTGSGGYFDLPPSVDSSSSIYALRPIPSPAGATAPADLSADSVRDPKRMRTGGSSTSSSSSSSSSLGGGARSSVVEAAPPVAAAANATPALPVVVVDTQEAGIRLVHALLACAEAVQQENLSAAEALVKQIPLLAASQGGAMRKVAAYFGEALARRVFRFRPQPDSSLLDAAFADLLHAHFYESCPYLKFAHFTANQAILEAFAGCRRVHVVDFGIKQGMQWPALLQALALRPGGPPSFRLTGVGPPQPDETDALQQVGWKLAQFAHTIRVDFQYRGLVAATLADLEPFMLQPEGEEDPNEEPEVIAVNSVFEMHRLLAQPGALEKVLGTVRAVRPRIVTVVEQEANHNSGTFLDRFTESLHYYSTMFDSLEGGSSGGGPSEVSSGAAAAPAAAGTDQVMSEVYLGRQICNVVACEGAERTERHETLGQWRNRLGNAGFETVHLGSNAYKQASTLLALFAGGDGYKVEEKEGCLTLGWHTRPLIATSAWRLAGP

SEQ ID NO: 2362 - protein, 281 aa, Nicotiana tabacum
MVRAPCCEKMGLKKGPWTPEEDQVLVSYIQTNGHGNWRALPKLAGLLRCGKSCRLRWTNYLRPDIKRGNFTREEEDSIIQLHEMLGNRWSAIAARLPGRTDNEIKNVWHTHLKKRLKNYQPPQNSKKHSKNNLDSKAPSTSQTFNNSDNFSNIQEDINGPVTGPNSPQRSSSEMSTVTADSTAMTTITIDDQNMFKQLDEMNSSESFIPEIDESFWTNDLSTGDNSNFDMEGTGEELQVQFPFSSVKQESMDMVGTKLEDDMDFWYNVFIKSGDLLDLPEF

SEQ ID NO: 2363 - protein, 658 aa, Glycine max
  misc_feature (443)..(443): Xaa can be any naturally occurring amino acid
MCSDSKSKLLSSPTLVMEDGLYNNSVLLELSASDDFEAFKREVDEKGLDVNEAGLWYGRRIGSKKMGSETRTPLMIASLFGSAKVLNCILLEKKGGGVDVNRVCGSDRATALHCAVAGGSESSLEIVKLLLDAGADAECLDASGNKPVNLIAPAFDSLSKSRRKAMEMFLRGGGERDDELMSQEIQERKEAISDNKKEYPVDISLPDINNGVYGTDDFRMYNFKVKPCSRAYSHDWTECPFVHPGENARRRDPRKYPYSCVPCPEFRKGTCQKGDSCEYAHGVFESWLHPAQYRTRLCKDETGCARKVCFFAHKPEELRPVYASTGSAMPSPKSYSASGLDMTAMSPLALSSTSLPMPTVSTPPMSPLAASSPKSGSLWQNKINLTPPSLQLPGSRLKAALSARDLEMEMELLGLESPARHHHHHQQQQQQQLIEEIARDLFXSFRSKEFNRIGDLNPTNLDDLLLASADPSVLSQLQSGLQMRQSMNNHLRASYPSNVPSSPVRKPSSFGFDSSAAVATAMMNSRSAAFAKRSQSFIDRGAAATHHHLGGMSSPSNPSCRVSSTLSGWSSPTGKLDWGVNGDELNKLRKSASFGFRNSGVTASSSSSPIAQPEFGTEQDVSWVHSLVKDVPSERSEKQQYDHLSKEMLLSPWVEATI

SEQ ID NO: 2364 - protein, 186 aa, Zea mays
MCDAAAVAAPRYRGVRKRPWGRFAAEIRDPAKRARVWLGTFDSAEAAARAYDVAARALRGPLARTNFPALTSRPPANLPAPTPTCSSSSTVESSSGPRAGDPRARAAHRGRAAAKPRRPPRQAPPPPTDADCHSDCASSASVVDDGDDASTVRSRARPSLDLNLPAPLDLDGGHDLGFCTDLRLCL

SEQ ID NO: 2365 - protein, 283 aa, Hypocrea jecorina
MESQNQSAPTHPSHNRPTPVYDPTQGGHYGACAALASQGFAPAELYTGPWANVHQGLTGPYKDILTTYWQQTISHLESDTHDYKIHQLPLARIKKVMKADPEVKMISAEAPILFAKGCDIFITELTMRAWIHAEENKRRTLQRSDIASALAKSDMFDFLIDIVPREEATAHAKRTNTQPSAAQSVPGAGQAPMPGQHAGMAPAAGHPSSHSMATADYIGGHALPSEQDYRQPPSMYPGQVPQAPPAAYGQPQPQAAMYGEMDNMYQYSAMQPQQPPMPSEDFE

SEQ ID NO: 2366 - protein, 292 aa, Oryza sativa
SERETGEREEGEMFPSPGRAVMALGHHGAARQPPTTMAAAASSSTTSAAAAPATATTTVAFSFQHPTPTPSHHHHHHGVLGYSPLVLDHHHPTTAAASSHAPSPPTLHHHHGGGLHAAAPPPRSSPPHPWSCEEGDHRGRPQMGNKGEAAAAMGAMGINDAGNNTAAAAAAQHHLGVGAVRMKKVGGGGGGGGKARRKVREPRFCFKTMSDVDVLDDGYKWRKYGQKVVKNTQHPRSYYRCTQDNCRVKKRVERLAEDPRMVITTYEGRHVHSPSRDDDDAARASAEMTFIW

SEQ ID NO: 2367 - protein, 283 aa, Nicotiana tabacum
MQRSNKRFREDGTSNTDQNNQQFPHFPRLTGEEEYSVMVSALKNVINGSIPMENTQQFYSFSPFQYCTATSTATTVTAYSSPSNSMSTIEQGNVVSPILGVPAEQEPCPFCRIKGCLGCDIFGTTSNAAAVVAADDNKKNSTTTTAVTKKKKKNYRGVRQRPWGKWAAEIRDPRKAARVWLGTFNTAEDAARAYDKAAIEFRGPRAKLNFSFADYTEIQEQQSASSSSPQQLPEPQLQQGNNTEFGNEIWDQLMGDNEIQDWLTMMNFNGDSSDSTGGNVHSV

SEQ ID NO: 2368 - protein, 496 aa, Brassica napus
GSTTLLLSLSSYQILEMASDGEGACMQCKKIPPTEESLTCRTCGTPWHVPCLSSPPDSLASTLQWECPDCSGDFDPVPQPGEGSDLVAAIRAIESDVTLTDEEKAKKRQQLLSGKAVVEDDDEEEEEKKKSSSMGLDADILAALGDNLKCPFCLQLLERPVTTPCGHNFCLKCFVKWTGQGKRECIKCRFVVPNDVAANPRINASLVSAIRLAKVSRTSAAAAAASTSNVYHYVSNENRPDQAFTTERAILSGIANAASGKIYVTVPGDHFGPIPAENDPVRNQGVLVGESWKNRLACKQWRAHIPHVAGIAGQSKHGAQSVALSGGYDDDEDHGEWFLYTGSGGRDLSGNKRTNRQQSFDQKFTNGNEALRLSCRMGYPVRVVRTYKEIIAAYAPEEGVRYDGVYRVEKCWRKVGVQGEFKVCRYLFVRCDNAPAPWTSDEHGDRPRPLPDVPELEEAIDLFERIETPSWDFDEAESCWKWMKPPPASNSLFMFW

SEQ ID NO: 2369 - protein, 261 aa, Nicotiana tabacum
MQRSTKRSKQEETVSINHLISKPKFTDEQEFSIMVSALTNVITGDTTQEFQYIISSSSPSTSMYSFDPPLFRVPKEPEPCQFCKIKGCLGCKYFGAPDPVAAAAAADNNNKAKIVAKKKKKNYRGVRQRPWGKWAAEIRDPRRAARVWLGTFNTAEDAARAYDKAAIQFRGPRAKLNFSFADYKSIQQHNTTTSISCSKQQQQEPIQLEQGIKTDVGIGKDEEFWDQLMKWDNEIQDCLNIMDFNGHSSDSAGGSIAHSFR

SEQ ID NO: 2370 - protein, 261 aa, Gossypium hirsutum
MCGGAIISDFVAVKHDPKLTGDDLWSEIDIFSDLLGFDNNGKSFVNHQFHNNNKKLINPKDNQLNKERSETIQKTSRVTKNVEKTQRTRKNFYRGIRQRPWGKWAAEIRDPQKGVRVWLGTHNTAEEAARAYDEAAKRIRGDKAKLNFPQTPTKNQAASPALTQLPPAKKRCIVPELTQPSFQTDSPPYPMGLGSGRSEDYKPIEVVESELELKEQIWSLESFLGLETNHETMTQLSGNGGTDSLELWTLDDLVTQYKQRR

SEQ ID NO: 2371 - protein, 233 aa, Fraxinus americana
HGNKWKKIAAEVPGRTAKRLGKWWEVFKEKQLKQLQKSHNSRQEYDNPVAGSAVAGGGSPEKAVQGKYDHILETFAEKYVQPKMFAFQSPNIIIPPNLPLPEPHPVLSIGSSRPVQLSGPILPPWMNNTTHPHTQTSSSLTSSSSSTHSPSVSLTLSPSEPAVLDPIHPEPGLPTRFLPIKQMNTLIQYCKELEEGRQIWLHHKKEATWRLTRLEQQLESEKTRKRREKMEEI

SEQ ID NO: 2372 - protein, 225 aa, Meliosma dilleniifolia
MGRGKIEIKRIENTTNRQVTFCKRRNGLLKKAYELSVLCDAEVALIVFSTRGRLYEYANNSVKATIDRYKKACADTSNTGSVSEANAQFYQQESSKLRQQIVILQNSNRHLMGEALSAMTVKELKQLEGRLEKGISRIRSKKNEMLFAEIEYMQKREIDMQNDNMYLRAKIAENERAQQHMSMMPTSEYEAMPPQQFDSRNFLQVNLLEPNHHYSRQEQTALQLG

SEQ ID NO: 2373 - protein, 212 aa, Chloranthus spicatus
IENTTNRQVTFCKRRNGLLKKAYELSVLCDAEVALIVFSTRGRLYEYANNSIKSTIERYKKASADSSSTTSIAEANTQYYQQEASKLRQQIHILQNSNRHLMGDALSSLSIKELKQLENRLERGITRIRSKKHELLFAEIEYMQKREADLQNDNMYLRAKIAENENAQQANMLPGPEFDTLPTFDSRNYFQANILEAAPQYSHQDQTALHLG

SEQ ID NO: 2374 - protein, 207 aa, Arabidopsis arenosa
MASFEESSDLEAIQSHLFEDLLACDGFMGDFDFDASFVSGLWCIESQVPKQEPDSPVLDPDSFVNEFLQVEGESSSSSSPELNSSSSTYETDQSVKKAERFEEEEEARHYRGVRRRPWGKFAAEIRDPAKKGSRIWLGTFESDVDAARAYDCAAFKLRGRKAVLNFPLDAGKYEAPANSGRKRKRSDVQEELQRTQSNSSSSSCDAF

SEQ ID NO: 2375 - protein, 343 aa, Oryza sativa
MVQCHEVGQPRGERRKVQEEEKHQGQYIDGLSPHRPRLHLISSFPNHSLLLEHTPLFLIIISSLIREELANMHIYKEQEAEPSTGLMMPEPAPVASPGSGGSGGSGSVGAEKIGSRGKIEIKRIENTTNRQVTFCKRRSGLLKKAYELSVLCDAEVALVVFSSRGRLYEYSNNSVKETIERYKKANSDTSNASTVAEINAQHYQQEAAKLKQQITNLQNSNRTLVGDNITTMNHRELKQLEGRLDKGLGKIRARKNELLCAEIEYMQRRETELQNDNMYLKSKVAESERGLQTVNMMGSASTSEYVQNMIHYDPRNFLQFNIMHQPQYYPEQEDRKAFMSDER

SEQ ID NO: 2376 - protein, 213 aa, Chloranthus spicatus
IENTTNRQVTFCKRRNGLLKKAYELSILCDAEVALVVFSSRGRLFEYSNNSVKTTIDRYKKAHADSNSASVSEANTQFYQQEAAKLRQQLGILQNSNRHMMGESLSSMNIKELKSLEVKLEKGISRIRSKKNELLFSEIEYMQRREMDLQNDNMYLRSKIAENERAQQHMNVLPGPEYDVMPAFDGRNFLPVNLLGSNHHQFSHQDQTALQLG

SEQ ID NO: 2377 - protein, 226 aa, Saruma henryi
MGRGKIEIKRIENTTNRQVTFCKRRNGLLKKAYELSVLCEAEVALIVFSSRGRLYEYANNSVRTTIDRYKKASDSSNPASVSETNSQYYQQEATKLRQQIGILQNANRHLMGESLSSMSVKELKQLETRLEKGISRIRSKKNELLFAEIEYMQKREVELQNDNIFLRGKIVENERAQQNMNMLPGGGGYEVMSQHPPYDSRNYLPVNLLEHNQHFSHQEPTALQLG

SEQ ID NO: 2378 - protein, 196 aa, Nymphaea sp. EMK-2003
KRRNGLLKKAYELSVLCDAEVALIVFSSRGRLFEYANNNIKATIDRYKKACAESSNANSVTEANAQYYQQEATKLRQQIQILQNANRHLMGESLSNLSVKELKQLENKIERGITRIRSKKNELLFAEIEYMQKRELELQSDNMYLRAKVAESERAQHSNMLPGSDYETMQTFDSRNFFSVNMLQYSNQDQTALHLG

SEQ ID NO: 2379 - protein, 448 aa, Magnaporthe grisea 70-15
MSSQKQKVSAIASPYPYAAAPDIIRAHQKDAYFSGVLTNQLTDLHRRFLGARSAHAWSGNARTTAELVYLALTTLIGNRTLGEEYCDLVQVEASEPAPLSILSGGPKRSSSDDGNHGRGIPGPRLPSITRRAAYITLSILIPHLFSRFMPTIRAALRRRLEARLQTLAARAGRKAQASNKGKAGEPPKMPLEAHIERYILAHLPALTSGGPWQAAALAAFYFGGAYYGLAKRIVGLRYVFTRDITAGGTQNNRAGYEVLGVLLVVQFTVQAYINARSLLAATAHTSASSQPRIEQDEENEATLEADAEDGFALREPHRHPHTFGVEVSLDHAHSYTANNFILLPGDDQNQGPTATIDISRATHTPVMPRGGARYDLANPKVMCWIKGDQQRRCTLCLEGLRDPSATPCGHVFCWSCIGDWVREKPECPLCRREALVQHILPLRAPIAA

SEQ ID NO: 2380 - protein, 162 aa, Arabidopsis thaliana
MNRLPSSEDGDDEEFSHDDGSAPPRKKLRLTREQSRLLEDSFRQNHTLNPKQKEVLAKHLMLRPRQIEVWFQNRRARSKLKQTEMECEYLKRWFGSLTEENHRLHREVEELRAMKVGPTTVNSASSLTMCPRCERVTPAASPSRAVVPVPAKKTFPPQERDR

SEQ ID NO: 2381 - protein, 416 aa, Zea mays
MMEAGGAGAGAGGRDERVPQWGAQETRELIMARGEMERETVAARRSAKTMWEAVAARLRERGYRRTAEQCKCKWKNLVNRYKGKETSDPENGRQCPFFEELHGVFTERARNMQQQLLESESGVSVKRKLKRPGGDRSSGESDDKDNDGEESDDEKPMHNRKRKADDKKQQHQRMSEKSRTGISSIHELLQDFLVQQQHIDVRWREMIERRAQERVVFEQQWRLTMQRLEQERGWERVPNAVAALVFHLTVSSLLFLFPNRARVLALPPPPGAAAVVEASRRRRRGGQGMGHGRLRCRSGRPRLTRSRCPSGKARYAAPSLHLGLRISLKFSGRGSNSVPSSVLILMGSSLRCHGVWTRVKFSQSPQWQLMSCPLVAADVVSLGDSWLGYAICKGLLEPVKNAEGQDWFCRLSDRWK

SEQ ID NO: 2382 - protein, 424 aa, Zea mays
  misc_feature (23)..(23): Xaa can be any naturally occurring amino acid
MPPPPPPPPGLPSLAPSPPRPPXQPPAEAPQLRVHGAGSGSGVARACRHHAYSRKQKSLGLLCSNFVALYDREDVEVIGLDDAAKRLGVERRRIYDIVNVLESVGILVRRAKNRYTWLGFGGVPAALKELKERALRKMSGSPVLLSMEDSSTANLSDDEDDEKLGDADEDAESEKLSQPVDNTSDKPDAPSCRLRSDHRKEKSLGLLTQNFVKLFLNMEVGTISLDEAARLLLGEGHADSNMRTKVRRLYDIANVLSSLNLIEKTQQADTRKPAFRWLGQAKRKQDNNVMVSVPPSMKAMPNKRAFGTDLTNIDNKRGKLDSAAENKVKLMQGAGNIVKTFERQLVQGKRSDFVYGPFHPAGAKKHETDDQTVKQQERKNIQDWENLAVSFRPQYQNQALNDLFGHYVEAWKSWYVDLTQETAS

SEQ ID NO: 2383 - protein, 279 aa, Arabidopsis thaliana
MEETEKNKGSISMVEANLPPGFRFHPRDDELVCDYLMRRTVRSLYQPVVLIDVDLNKCEPWDIPQTARVGGKEWYFYSQKDRKYATGYRTNRATATGYWKATGKDRAIQRNGGLVGMRKTLVFYRGRSPKGRKTDWVMHEFRLQGKLLHHSPNSLEEEWVLCRVFHKNSNGADIDDITRSCSDATASAFMDSYINFDHHHIINQHVPCFSNNLSHNQTNQSGLISKNSSPLFNASPDQMILRTLLSQLTKKVEESQSRGDGSSESQLTDIGIPSHAWNY

SEQ ID NO: 2384 - protein, 228 aa, Oryza sativa (indica cultivar-group)
MGATSPSGLELTMAVPGLSSSGSEGAGCNNNNAGGGCNMRDLDINQPASGGEEEEFPMGSVEEDEEERGVGGPHRPKKLRLSKEQSRLLEESFRLNHTLTPKQKEALAIKLKLRPRQVEVWFQNRRARTKLKQTEMECEYLKRCFGSLTEENRRLQREVEELRAMRVAPPTVLSPHTRQPLPASALTMCPRCERITAATGPPAVRPPPSSAAAAAPSPFHPRRPSAAF

SEQ ID NO: 2385 - protein, 322 aa, Glycine max
MGEETTESEKEDGVTNLDTVSRPGEVSINPSTKKEDLTLKTSKKTEQEQGENSQDKTLRKPDKILPCPRCNSMDTKFCYYNNYNVNQPRHFCKNCQRYWTAGGVMRNVPVGAGRRKNKNFTSQYRQITVPEAALLSSQPDLPNGPSLNCNATLLAFGSDTPLCESMTSVLNLAEKAVNNSTTNGFNGSEELEIPFAYVAGEKVNDDSNKSSDMSTKPMEGETTNRSQEQVIENCHPFPPHAPYFPGAPWPFPWNPALWNSPVPSPPAFFPQGFTMPLYPAAAYWGLTIPGAWSIPWLAQPSLPNSTVSNSGPDPIARTIAMS

SEQ ID NO: 2386 - protein, 582 aa, Zea mays
MDTLFRSVSLQASEQQQQQQSASYNSRSTTSSGSRSSSHQTDASYNYYYHSNSGVGGVGQYYYGQQHPHQHQHQQYYLEPYQQEECGNAHRLYMDEDFSSSSSSRQHFHSHGAAVQPATSSAVTATAPTPPLSTSSTAAGAAHALFEAADLSFPPDLNLDFSSPASSSGGCVASSAAVGGGGGGRWASQLLLECARAVAARDSQRVQQLMWMLNELASPYGDVEQKLASYFLQGLFARLTASGPQTLRTLAAASDRNTSFDSTRRTALRFQELSPWSSFGHVAANGAILESFLDAAAAAARLLWPTLLEALATRSTDDTPHLSITTVVSSAPSAPTAAVQRRQRVMREIGQRMEKFARLMGVPFSFRAVHHAGDLAGLDLDALDLRDGGATTALAINCVNSLRGVVPGGARRRDAFAASLRRLDPRVVTVVEEEADLVAFDPGAPEESGDTEAAFLKVFGEGLRFFSAYMDSLEESFPKTSNERLALERGAGRAIVDLVSCPASESMERRETAVSWARRMRSAGFSPVAFSEDVADDVRSLLRRYREGWSMRDTGLDDSAAGAGIFLAWKEQPLVWASAWRP

SEQ ID NO: 2387 - protein, 293 aa, Populus tremula x Populus alba
MDPDSRDPPIEYREGYALSGKIMLSAILILFFVIIVMVLLHLYARWYLTRARQRQVRRVRNRRTHLVFYVDSPQNPNNVTSHVTRGLEETVKNSLPVFVYPRKTHQDSIECAVCLSEFEENERGRVLPKCNHSFHTECIDMWFHSHSTCPLCRSPVEPVAENPVPEGSNFGISEAGSGLCTSCQHEEDHLGSASTSSFNGGRKPVGLIGVTIDVPRRNGNFEDESNTESPSASHSFRSPMSRMLSFKRMLSRERRGTVSPTVANSVSCGGGSGTTEFDIEQGRDESMPQQTRC

SEQ ID NO: 2388 - protein, 307 aa, Oryza sativa (japonica cultivar-group)
MEQKDEAEMEEVDEEEEEEVDEDMAGGHAAQSPSPSCGLGEKKRRLALEQVRALERSFDTDNKLDPDRKARIARDLGLQPRQVAVWFQNRRARWKTKQLERDFAALRARHDALRADCDALRRDKDALAAEVRAHRCVLPDARESLSLTFNSCSIDQIRELREKLPTKPADTAASVKVEAGNDAAAGAAAATVCKDGSSDDSDSSVVFNDEASPYSGAAFIGFGPSFLVDDASAATVGCSSSLPALESKWHGPYSDDSCKGGVYGFTEEWLAACSGEMAGNDAAGFFSDEHASNLNFGWCASGNEGWE

SEQ ID NO: 2389 - protein, 380 aa, Populus tremula x Populus alba
MCGGAIISGFIAPTTTARSSRRLTSGFEWLEPKKPFNNKHLKPVVADPEDDFEADLQEFKDESDVDEDYDVFADAKPFAFSASASEPAKKRGLPRGSTAVKSAGFSGLAKNSAKRKRKNQFRGIRQRPWGKWAAEIRDPRKGVRVWLGTFNTAEEAARAYDSEARRIRGKKAKVNFPDEAPCASARHPIKENSQKRLTKANLSQDFSYLSNPETDYNNMGFVEEKPQVSQFGIMNSIPVNGDSGVTPLTPSDNASMYFNSDKGSNSFDCDFGWGEQGAEILSVLAATPEVDESVFVEANPKKLKSYTEYAVPVEERNGKSLSEELLAFDNQLMNLQMPDLVGNWEASLDSFLNGDTTQDGTNAVDLWSFEDFPSMVGGVY

SEQ ID NO: 2390 - protein, 213 aa, Nymphaea sp. EMK-2003
KRRSGLLKKAYELSVLCDAEVALIIFSSRGRLYEYANNSVKATIDRYKKACDSSNSGTVTEANAQYYQHESHKLRQQISKIQQDNRQMLGEGISEMSHRDLKNLESKLERSISKIRSKKNDLLNAEIQYMKKRDDDLQKENIYLRARINENERAHQQQQQQQHVTVMTGGPSSEYEVLPMTFQHVNLLEPSHHQHHHHHHYSAHQERTALQLG

SEQ ID NO: 2391 - protein, 85 aa, Selaginella moellendorffii
EVVSLSPKTLMESDRYICEICNQGFQRDQNLQMHRRRHKVPWKLLKRATPEVRKRVYVCPEPSCLHHDPCHALGDLVGIKKHFRR

SEQ ID NO: 2392 - protein, 224 aa, Nymphaea sp. EMK-2003
MGRGKIEIKRIENTTNRQVTFCKRRSGLLKKAYELSVLCDAEVALIVFSSRGRLYEYANNSVRGTIERYKKAYAESSSSGAVAETNAQYYQHEAHKLRQQISKIQQDNRQMLGEGVSEMSLRDLKSLENKLERSISKIRGKKNDLLNGEIQYMQNWNEDLQKENTFLRAKVCENERAQQQHISILAAGPAEYELPPAVPFQHINLMESSHHQYSHQERTALQLG

SEQ ID NO: 2393 - protein, 249 aa, Capsella rubella
MLKSVSPMAFYDIGEQQYSTLGYIVSKPAIGNGGVYDLDPPIPTIDDAIYGSDEFRMYAYKIKRCPRTRSHDWTECPYAHRGEKATRRDPRRYTYCAVACPAFRNGACHRGDSCEFAHGVFEYWLHPARYRTRACNAGNLCQRKVCFFAHAPEQLRQSEGKHRCRYAYRPVRARGGNSNGVAMRMDGEDYDTSRSPEKSGKSVGLDSNEEKVLLKCWSRMSIVDDHYEPSDFDFDLDLSHFDWISELID

SEQ ID NO: 2394 - protein, 204 aa, Berberis gilgiana
KRRNGLLKKAYELSVLCDAEVALIVFSARGRLYEYANNSVKTTIERYKKACSDSTNTGSVSEANAQFYQQEATRMRQQIGNLQNANRHLLGQDLSSVSVKDLKQMETRLEKGISRIRSKKNELLFAEIEYMQKREIDLQNDNMYLRAKIAENERAQQQMNLMPGNEYETITSAPYDSRNFLQVNLLPESNNQYSRSDQTALQLG

SEQ ID NO: 2395 - protein, 202 aa, Akebia quinata
RRNGLLKKAYELSVLCDAEVALVVFSNRGRLYEYANNSVKTTIERYKKACIDSSNSGSVSEANAQFYQQESLKLRQQIGNLQNLNRHLMGEALGSMSIKELKQLETRIEKGISRIRSKKNELLFAEIEYMQKREIDLQNDNMYLRAKIAENERAGQHMSLMPGNEYEVMSSAPFDSRNFLQVNLLEPNNHYSHTDQIALQLG

SEQ ID NO: 2396 - protein, 204 aa, Capsella rubella
MATIEESSDLEAMQKHLFEDFLVSDGFLGDFDFDASFVSGLWCIEPQVPKQEPDSPVLDPDSFVNEFLQVEAKSSPELNTSSSSTYETDQCVKKAERFEEEVETRHYRGVRRRPWGKFAAEIRDPAKKGSRIWLGTFESDVDAARAYDCAAFKLRGRKAVLNFPLDAGKYEAPANSGRKRKRSDAQEELQRTHSNSSSSSCDAF

SEQ ID NO: 2397 - protein, 330 aa, Triticum aestivum
  misc_feature (268)..(268): Xaa can be any naturally occurring amino acid
  misc_feature (293)..(293): Xaa can be any naturally occurring amino acid
  misc_feature (302)..(302): Xaa can be any naturally occurring amino acid
MEEVFPSNSKSKAGQMAGEATAAAEKKPRPKPEQKVECPRCKSGNTKFCYYNNYSMSQPRYFCKACRRYWTHGGSLRNVPIGGGCRKPKRPGTSDAHKLGVASSSEHTAVMPPSTCTGMNFANVLPTFMSAGFEIPRSLSLTTFGSSSSSNTTAVMSPGGTTSFLDVLRGGTGGLLDGNLGQNNGYYYGGSRSGIGMLMTPPAASFGIPGPMQQHGDLMVGGNGIGAATASIFQGGTGEEGDDGIGAMMGLQWQPHVGNGGGGGVVSXGGVHHLGTGNNVTMGNNNINNNNKXNAATSDDNXGGSSRDCYWINNGGSNPWQSLLNSSSLM

SEQ ID NO: 2398 - protein, 160 aa, Glycine max
  misc_feature (151)..(151): Xaa can be any naturally occurring amino acid
MDTRKRGRPEPGFSLNGGFKKSKQEMESLSTGVGSKSKPCTKFFSTAGCPFGEGCHFLHYVPGGYNAVAHMMNLTPAAPPASRNVAALPPVPNGSAPPAVKTRICNKFNTAEGCKFGDKCHFAHGEWELGKHIAPSFDDHRTMGPTGVGRXAGRMEPLLL

SEQ ID NO: 2399 - protein, 239 aa, Triticum aestivum
  misc_feature (26)..(26): Xaa can be any naturally occurring amino acid
MDAAARKRSRPESANGGSAGGKRSRXTVGCPFGEGCHFAHFVPGGYQAVSKSHSLGHAAVSAASRAPADHAASGVKTRMCTKYNTAEGCKFGDKCHFAHGERELGRPPSSYMSQESSYAPPMGGRYGGRHEPPLPASMGPPAGNFGASSTCKVSVDAALAGGIIGKGGVNTKQICRITGVKLSIRDHESNPDLKNPASAAAPAGRGGGGGGGGPGGRSNYKTKICENFLKGTCTFGERC

SEQ ID NO: 2400 - protein, 514 aa, Hypocrea jecorina
MGVIRKKTATRGGEGGVKYVCDVCSCDITSTVRIRCADPACSDFDLCVPCFGKGESRNAHDPATHAFRVIEQNSFPIFDREWGADEELLLLEGAEIYGLGSWADIADHIGGFREKDEVRDHYLKTYIESPNFPLPERCSPHNNELANEIPREEFQARKKRRIEERREASKNAPALQPKTKPTASVPSCHEIQGYMPGRLEFETEYANEAEEAVQLMQFDPGDGINPKTGELEPEMELKLTVMEIYNCRLTQRVERKKVIFEHNLLDYRENTKQEKRKTKEERDLLQRAKPFARIMNHKDFEDFTQGLQDELNLRQAIAQLQEWRSMKIGDLRSGEKYEAEKAARIQKAIPMGSMDRERLASSQRSKAQPPPEPPSGASLLVAPELPIRSAQANGEANGEDGKALTNGQANGVNGHSPAKQKYVPQPISGVPPLQLTQENAPDYHLLTPEEAKLCEVLRLQPKPYLMIKEQIIKEAIKGNGTLKKKQAKEICRLDSQKGARLFDFFSNAGWVGKA

SEQ ID NO: 2401 - protein, 238 aa, Oryza sativa
  misc_feature (218)..(218): Xaa can be any naturally occurring amino acid
MARGKVQLRRIENPVHRQVTFCKRRAGLLKKARELSILCEADIGIIIFSAHGKLYDLATTGTMEELIERYKSASGEQANACGDQRMDPKQEAMVLKQEINLLQKGLRYIYGNRANEHMTVEELNALERYLEIWMYNIRSAKMQIMIQEIQALKSKEGMLKAANEILQEKIVEQNGLIDVGMMVADQQNGHFSTVPLLEEITNPLTILSGYSTCRGSEXGLFLLTLIMAWGILVFITSV

SEQ ID NO: 2402 - protein, 219 aa, Antirrhinum majus
MGRSPFCDKTGLKRGPWTPEEDQKLLACIQEHGHGNWRALPAKAGLERCGKSCRLRWNNYLRPDIKRGKFSSQEEQTIIQLHALLGNRWSAIATHLSRRTDNEIKNYWNTHIKKKLAKMGIDPVTHKPQRDHALSSNNAHVQSKNAANMSHLAQWESARLEAEARLARQSKLQANSECGGGSDTGGGGSDCCGDNKNYWDNILDLVNFSPSDSPIFRVF

SEQ ID NO: 2403 - protein, 1927 aa, Helicobacter pylori 26695
  misc_feature (907)..(907): Xaa can be any naturally occurring amino acid
MNEENDKLETSKKAQQDSPQDLSNEEATEANHFENLLKESKESSDHHLDNPTETQTHFDGDKSEETQTQMDSEGNETSESSNGSLADKLFKKARKLVDNKKPFTQQKNLDEETQELNEEDDQENNEYQEETQTDLIDDETSKKTQQHSPQDLSNEEATEANHFENLLKESKESSDHHLDNPTETQTNFDGDKSEETQTQMDSEGNETSESSNGSLADKLFKKARKLVDNKKPFTQQKNLDEETQELNEEDDQENNEYQEETQTDLIDDETSKKTQQHSPQDLSNEEATEANHFENLLKESKESSDHHLDNPTETQTNFDGDKSEEITDDSNDQEIIKGSKKKYIIGGIVVAVLIVIILFSRSIFHYFMPLEDKSSRFSKDRNLYVNDEIQIRQEYNRLLKERNEKGNMIDKNLFFNDDPNRTLYNYLNIAEIEDKNPLRAFYECISNGGNYEECLKLIKDKKLQDQMKKTLEAYNDCIKNAKTEEERIKCLDLIKDENLKKSLLNQQKVQVALDCLKNAKTDEERNECLKLINDPEIREKFRKELELQKELQEYKDCIKNAKTEAEKNKCLKGLSKEAIERLKQQALDCLKNAKTDEERNECLKNIPQDLQKELLADMSVKAYKDCVSKARNEKEKQECEKLLTPEARKKLEQQVLDCLKNAKTDEERKKCLKDLPKDLQSDILAKESLKAYKDCVSQAKTEAEKKECEKLLTPEAKKLLEEEAKESVKAYLDCVSQAKTEAEKKECEKLLTPEAKKKLEEAKKSVKAYLDCVSRARNEKEKKECEKLLTPEAKKLLEQQALDCLKNAKTDKERKKCLKDLPKDLQKKVLAKESVKAYLDCVSQAKTEAEKKECEKLLTPEARKLLEEAKKSVKAYLDCVSQAKTEAEKKECEKLLTPEARKLLEEXAKESVKAYLDCVSQAKNEAEKKECEKLLTLESKKKLEEAKKSVKAYLDCVSQAKTEAEKKECEKLLTPEAKKLLEQQALDCLKNAKTEADKKRCVKDLPKDLQKKVLAKESLKAYKDCVSKARNEKEKKECEKLLTPEAKKLLEEAKKSVKAYLDCVSQAKTEAEKKECEKLLTPEARKLLEEAKESVKAYKDCVSKARNEKEKKECEKLLTPEAKKLLEQQVLDCLKNAKTEADKKRCVKDLPKDLQKKVLAKESVKAYLDCVSRARNEKEKKECEKLLTPEAKKLLEEAKESLKAYKDCLSQARNEEERRACEKLLTPEARKLLEQEVKKSIKAYLDCVSRARNEKEKKECEKLLTPEARKFLAKQVLNCLEKAGNEEERKACLKNLPKDLQENILAKESLKAYKDCLSQARNEEERRACEKLLTPEARKLLEQEVKKSVKAYLDCVSRARNEKEKKECEKLLTPEARKFLAKELQQKDKAIKDCLKNADPNDRAAIMKCLDGLSDEEKLKYLQEAREKAVADCLAMAKTDEEKRKCQNLYSDLIQEIQNKRTQNKQNQLSKTERLHQASECLDNLDDPTDQEAIEQCLEGLSDSERALILGIKRQADEVDLIYSDLRNRKTFDNMAAKGYPLLPMDFKNGGDIATINATNVDADKIASDNPIYASIEPDIAKQYETEKTIKDKNLEAKLAKALGGNKKDDDKEKSKKSTAEAKAENNKIDKDVAETAKNISEIALKNKKEKSGEFVDENGNPIDDKKKAEKQDETSPVKQAFIGKSDPTFVLAQYTPIEITLTSKVDATLTGIVSGVVAKDVWNMNGTMILLDKGTKVYGNYQSVKGGTPIMTRLMIVFTKAITPDGVIIPLANAQAAGMLGEAGVDGYVNNHFMKRIGFAVIASVVNSFLQTAPIIALDKLIGLGKGRSERTPEFNYALGQAINGSMQSSAQMSNQILGQLMNIPPSFYKNEGDSIKILTMDDIDFSGVYDVKITNKSVVDEIIKQSTKTLSREHEEITTSPKGGN

SEQ ID NO: 2404 - protein, 171 aa, Brassica napus
MAYEKVNELNLKDTELRLGLPGTEQDKEEQEVSCVRSNKRQLQSDNEEESTLPTKTQIVGWPPVRSYRKNNNSVSYVKVSMDGAPYLRKIDLKTYKNYPELLKALENLFKFTIGEYSERDGYKGSGVVPTYEDKDGDWMLVGDVPWDMFSSSCKRLRIMKGSDALALDSAL

SEQ ID NO: 2405 - protein, 199 aa, Aquilegia alpina
AGILKKAKELNVLCDAQVALIMFSTTDKLTDFVSPNTTMKKTFDMYQQASGTNLWNSHYEKMQEALKKQKETNRKLRKEIGQRVGAEDLSDLSFEELCGLEQHLESSVKIVAQRKFTQITTQTETSKKKIKSLEEMHNNLLHEYEERLVEEYALADHEGLSALEMAANGASHIFAFRLQPSQPNLHGDGGCGFEDLRLG

SEQ ID NO: 2406 - protein, 288 aa, Triticum aestivum
MGAPKQKWTSEEEEALRRGVLKHGAGKWRTIQKDPEFSPVLSSRSNIDLKDKWRNLSFSASGLGSRDKQRVPRPKAPSSSPSPSPQLLLLSAPNNVAEASPPEDCEKSPQDDKTPSPKLYSSMILEALGELKEPNGSEVATICNFIEQRHEVQPNFRRLLCAKLRRLIGVNKVEKIDKSYKLTDSYAKRALAPMKDPSLKKKDSAKSSKAAKGLGQLSPALDAAEAAAMKVADAEAKSHLANEHMMEVERIGKMAEETESLLELASELYERCSRGEALTILQVAHREF

SEQ ID NO: 2407 - protein, 382 aa, Triticum aestivum
  misc_feature (118)..(118): Xaa can be any naturally occurring amino acid
  misc_feature (131)..(131): Xaa can be any naturally occurring amino acid
  misc_feature (172)..(172): Xaa can be any naturally occurring amino acid
FSSVCWGVKDERMDALKGSSRQEETPDEAAAAAEAPAAWGFAERDGFSVEDLLDLEEFCEPDKDGADEPEEAPAADVKEEKLNDGPNQPVVSYELAPPAPPAPEIVDLPAHDVEEELXWVSRIMDDSLSEXLPPQLAPPASMMASLAPRPPQHRLPQRAAAPAGWSVPCSAXMSDPMRTPTICALSTEALVPVKAKRSKRSRASGWSLSGPAPDSTSSSSTTTTSSCSSSASFSPYFLLDTPHFGASELMEEYNILPPPPKKSKHGKSSKQKAKKRGRKPKNLPAPSSAMEAATQSDRRCSHCGVQKTPQWRAGPEGAKTLCNACGVRYKSGRLLPEYRPACSPTYVSSVHSNSHRKVLEMRRKKEDGPLTVTATAPAVASF

SEQ ID NO: 2408 - protein, 537 aa, Nicotiana benthamiana
MTIDEPEPNSNSDPISEWLDTLSDVPTFLDEPYNCPEDLNFYGDSWWIPPNQDEHIISHGIIHNDIRTSFNYSSPVNTATSTTPPEPIILDHPQPLDLSKKRKTSGPDHNPKVSRKNQNRQMNEADEIKKSTGQKRVTNKSTGNNGTNKEGRWAEHLLNPCAAAITVGNMNRVQHLLYVLHELASFTCDANHRLAAHGLRALTHHLSSPGSSSSPVDVTNFASSATHKFFRDSLINFNDISPWFRIPNSIANSSVLQILGEQDKLNNLHILDIGVSHGVQWPTLLKELTRRSGGPPPLVRLTVITPTTENGEFRGTPFVIGPPGYNFSSQLLAFAKAINVNLQINRLDNFPLQNLNSQILKSSSDDETLVICAQFRLHNLNHSIPDERTELLRILKNLDPKGVVLSENNIDCSCNSCGDFATTFSRRVEYLWRFLDSTSVAYKGRESEERRMMEGEAAKALTNMGEMNERKEKWCERMTSVGFVKEVFGEDAIDGARALLKKYDSNWEIRVEERDGCVDLWWKGQPISFCSLWKIDS

SEQ ID NO: 2409 - protein, 148 aa, Oryza sativa
MGGDKRGGERAEAAPAATTAGGWTVRLLHEEPVVSSPNSTLSSLSGKRGAPSAAAAAVGGSDDEDSDDGSRKKLRLSKDQAAVLEDTFNKHNTLNPKQKAALARQLNLKPRQTEVDCELLKRCCETPTDMKLKRGPPLPLPPPPPPLL

SEQ ID NO: 2410 - protein, 249 aa, Triticum aestivum
MLRPSPYSSRRLLQSGDPSRIPGIPPADPPAGVSSDVVVILAALLCALICVVGLAAVARCARSRRNANAHANQSSPSGSPAHALAAFGGGGGGHNHGTTTTTTTGASGGSVTTTSKGLKKKALKALPKLAYADAVAAAAAARGAVAGGEEEEGQDGILAECAICLTEFGEREEVRVMPQCGHGFHVDCVDTWLRSNSSCPSCRRPIVLDDPAPPKRCRKCEETILEAVIASSSSSAGGSRGGGRGGFLP

SEQ ID NO: 2411 - protein, 293 aa, Oryza sativa (japonica cultivar-group)
MSFIGMVEARMPPGFRFHPRDDELVLDYLLHKLAAGGRGGGVYGGGGGVAIVDVDLNKCEPWDLPDAACVGGKEWYFFSLRDRKYATGHRTNRATRSGYWKATGKDRSITRRSSISSGEPSSSAAAAAVGMRKTLVFYRGRAPKGRKTEWVMHEFRLEPQPLHLKEDWVLCRVFYKTRQTIPSPSSEEAVTLPNELDLPATPSLPPLIDAYIAFDSAPTTTPSMVGSYEQVSCFSGLPALPMKGSISFGDLLAMDTSAEKKAIRVLHNSNTAKLELSPDWGQESGLSQMWNPQ

SEQ ID NO: 2412 - protein, 295 aa, Oryza sativa (japonica cultivar-group)
MAFLGQSRLYDGISWNSHLSMAFLVANGETEALHAAVLKEEEQQHEVEEAAVVTSSSATSGEEGGHLPQGWAKRKRSRRQRSEEENLALCLLMLALGGHHRVQAPPPLSAPVGAEFKCSVCGRSFSSYQALGGHKTSHRFKLPTPPASPVLAPASSEVQSPLAFSPRAASALGVGAAVGSSGNGHSAARAFDLNLPAGAIRDRTAATTREPGFGVFPEPLEYMFPSLLGFGVSTRVGNELGANRPGRACAAPHMAVAGAAAMGLVTMAFVAGMRRAWGHPSERKREREMRKEIGG

SEQ ID NO: 2413 - protein, 246 aa, Oryza sativa
MGRGKVQLKRIENKINRQVTFSKRRSGLLKKANEISVLCDAEVALIIFSTKGKLYEYATDSCMDKILERYERYSYAEKVLISAESDTQGNWCHEYRKLKAKVETIQKCQKHLMGEDLESLNLKELQQLEQQLENSLKHIRSRKSQLMLESINELQRKEKSLQEENKVLQKELVEKQKVQKQQLQWDQTQPQTISSSSSFMMREALPTTNISNYPAAAGERIEDVPAGQPQHVRIGLPPWMLSHING

SEQ ID NO: 2414 - protein, 172 aa, Solanum tuberosum
MENYATIFPSASSSSSHHDEYISLMNSKSSISDDAKEELLFQGKNKAGFLGLMASMETPRDIITKKDEVIKSCKKKIKKPRCAFQTRSQVDILDDGYRWRKYGQKAVKNNKFPRSYYRCTHQGCNVKKQVQRLSKDEEVVVTTYEGMHSHPIDKSTDNFEHILSQMQIYTSF

SEQ ID NO: 2415 - protein, 204 aa, Helleborus orientalis
KRRNGLLKKAYELSVLCDAEVALIVFSTRGRLYEYSNNSVKKTIERYKKASTDSSGSGSVSEVNAQYYQQEASKLRNQIATLQNSNRNLLGEQLSNLNIRELKQIEKKIETGINKIQSKKNELLFAEIEYMQKREADLQNDNMYLRAKISENERTQQHMSLMPGTNDYEVISSGAFDSRNFLQVNLLGSNDTYSRSDQTALQLG

SEQ ID NO: 2416 - protein, 216 aa, Helleborus orientalis
IENTTNRQVTFCKHRNGLLKKAYELSVLCDAEVALIVFSSRGRLYEYSNNSVKKTIERYKKASTDSSNSGSASEANAQYYQQEAAKLRNQIAALQNSNRNLLGEQLSNLSIRELKQIEKKIETGINKIRSKKNELLFAEIEYMQKREVDLQNDNMFLRAKISENERTQQHMSLMPGTNNYEVISSGPFDSRNFLQVNLLESNNNYSRSDQTALQLG

SEQ ID NO: 2417 - protein, 256 aa, Triticum aestivum
MVPRLERGGGGGFQLPNSEQENSLFLRALISVVSGDTAAPALHPEPSNPPFAAAAAAPVPACGRCGADGCPGCEFAAAAAAATTGSSSEGEECSAASFVRNGGVGKRRAGGGGSKFRGVRQRPWGKWAAEIRDPHRAVRKWLGTFDTAAEAARAYDVAALEFRGHRAKLNFPASSSAASASASASASSWAAAQPHPQRQQRPESPREKCGSNASSPVHVPRLPEQGRPVAREQEIWDGLHEIMMMDDGNFWSNPKP

SEQ ID NO: 2418 - protein, 528 aa, Zea mays
  misc_feature (466)..(466): Xaa can be any naturally occurring amino acid
MKPMSCHEQEQHAELAAATTNSGFDWLDDPISFLTADVDAAGCGGYGWWSDDPAAAQQDNIGSVVAQTLSPPAAPLLTTSPPLAHTSPSIASPAVSEPSSKKRKSPAHRASAHSGSNQRRRADQDRPGAGSSSGGSKRSGSKGGGAGSDRDTRWAEQLLNPCATAVEAGNLSRVQHLFYVLGELASFSGDANHRLAAHGLRALARSRLPAAVGPAAAAAVRVPPCDCPTPAFAGAEPRLFRASLIRFHEVSPWFALPNALANAAIAQAAASRGGRARGLQAPWPTLLESLTRLSGGRAPPSVCLITVAAAPPAPFSASPPGYDFSPHLLRYAKSISLQLAISRAASLDSVRGLASPSASGEEALVVCIQFRLGHASADERTEILRKVRGLDPELVVVSELDGGGDGTAAGEFTARLELLWRFLESTSAAFKGRDGDERRLLEAEAGTSLVASEAAALEGREAWREXIVAAGFEEAAFGDEAVESAKSLLRKYDGGWEMSASGAAGAVALRWKGQPVSFCSLWRPACSG

SEQ ID NO: 2419 - protein, 214 aa, Aquilegia alpina
IENTTNRQVTFCKRRNGLLKKAYELSVLCEAEVALIVFSNRGRLYEYANNSVRKTIDRYKKTCGEGSSTLTVSEANLLFYQQESSKMKQQIEILQNSNRHLMGEALSCLSIKELKQLESRLEKGISRIRSKKNEMLLAEIEFMQKREIELHNDNIYLREQITANERAQQHMNSLPGNVYEAITSAPYNSRDFLQVNLRESKPNQYCDSTALQLC

SEQ ID NO: 2420 - protein, 213 aa, Solanum tuberosum
MDLNLKETELCLGMPGGGGDRNIKKRGFSQTVDLKLNLDNPSININNTSSNNDSLKPPTKAQVVGWPPVRSFRKNIMSQKGNNNVEISEKGEKTIAFVKVSMDGAPYLRKVDLKMYKSYQQLSDSLTKMFSSFTMGNYGSQGMIDFMNERKLMDVLNSSDYVPTYEDKDGDWMLVGDVPWQMFVDSCKRLRIMKGSEAIGLAPRAMEKCKNRS

SEQ ID NO: 2421 - protein, 203 aa, Aquilegia alpina
KRRNGLLKKAYELSVLCEAEVALIVFSSRGRLYEYSNNSVKKTIERYKKASTDSNNSGSVSEANAQFYQQEATKLRNQIASLQNHNRNLLGESLSNLNIRELKQIEKKIEGGISKIRAKKNELLFAEIEYMQKRELDLQTDNKYLRAMIAANERAPEHMNLMPANEYHALSSAPFDSRNFMPANLLDHNNNYSRSDQTTLQLG

SEQ ID NO: 2422 - protein, 288 aa, Oryza sativa (japonica cultivar-group)
MDAFALPVEGTETRVNAQADAYEYMVEYSTINKQIGSHHAIDHNVSEVSVFANTLMTDLAGRLENVVGWYHSHPGYGCWLSGIDVSTQMLNQQFQEPFLAVVIDPTRTVSAGKVEIGAFRTYPKDYKPPDEPVSEYQTIPLNKIEDFGVHCKQYYALDITYFKSSLDSHLLDLLWNKYWVNTLSSSPLLGNRDYVAGQIFDLADKLEQAEGQLAHSRYGMLMPSQRKKEQEESPLAKVTRDSSKITAEQVHGLMSQVIKDILFNSVHPSNKASTSAPDSSGPEPMVEA

SEQ ID NO: 2423 - protein, 538 aa, Triticum aestivum
  misc_feature (156)..(156): Xaa can be any naturally occurring amino acid
SDLGSDLALSTPMPSSPSSSAASVDAPPPPEPPHAPYSPSRAGLSPPPPEVYSSYHPEDAHLPYAPPLPPVIHELPDDIGFGFHPPPSLVRASEFLWEDRPSSSTASSSFLPDAATRYRQLLEQTGSRWLRSRPTGRFRSDLPPLSSEAQPLGASXAAVPVPHHETTIDVVGDDKVTGNGVEVGASEESEERGKSVATFECNICFEMAGEPVVTSCGHLFCWPCLYQWLNVYSNHKECPVCKGEVTEANITPIYGRGNSCSDAEKAADEGKQPGLTIPPRPHGNRLESFRQQFQHLRPMSRRLGDAHGILSSWRRLLDQQIMSSVSRFEGPSEPAVHETGDIAPHTGRLSRLTTRMRARRLLSEVDNSPDAGFVAPDSGLPGNSAPDAPRDASGPVLPEGFDLLQRLTLIGIANTERLATAMSDLRRIATPGQHGASASYLRRLATPGQYGGSASSSNPLNPEATVDGTHVGAAPSTDQASNSSTIAVIQGDAGVSETAGEPSNAGSSRTLRRRGRSSALASLDVDGAPPQRNKRRRM

SEQ ID NO: 2424 - protein, 203 aa, Clematis integrifolia
KRRNGLLKKAYELSVLCDAEVALIVFSNRGRLYEYANNSVRKTIDRYKKTCSDPQTALTVSEANTMFYQQETTKMKQQIEILQNSNRHLMGEALSCLSIKELKQLESRLEKGLGRIRSKKNEMLLSEIEYMQKREIDLHNDNLYLRAKISDNEKAQHNMNVLPGNVYEAMTSAPYDARNFLQVNLPDTKEHPYCSGSTALQLC

SEQ ID NO: 2425 - protein, 422 aa, Zea mays
  misc_feature (41)..(41): Xaa can be any naturally occurring amino acid
NFRKTIVTTPRTPKPINKRREVTDAGRLKHTTALVGLRLPXALLMDALPPPAAVHPFAATLPPSLSPPSSSSSLNLSPSLLIIAALLAFVFFASVSIHFLLRCLARSSASSSSHRGPSPLPTRARRASEEEAEAEEVVGSTRRSAAAVGPEEAHAAEVDDEKERLIASLPLFTMASALAALPKSSPDCAVCLSPFSPDADLRLLPACRHAFHAACVDAWLRTTPSCPLCRAAVSLPHPPLPTAPPLAAGSAQEALDSRVSSSSNSRSFRVEIGSVSNRRSSAAGDDRRTYSLGSFDYRVDEEVEAVVSRITRPAVSAAAKSETQAAPGEALAEAAGSRGWLREYVDRLASSASSLSGRWSARWSQGHHSARWSQGHHSRSHSNRQEDSLWWDPEAAAGAAMHRAPDEEEPGFVALYRWIVGV

SEQ ID NO: 2426 - protein, 189 aa, Brassica napus
MAFAGTTQKCMACDKTVYLVDKLTADNRVYHKACFRCHHCKGTLKLSNYNSFEGVLYCRPHFDQNFKRTGSLEKSFEGTPKIGKPDRPLEGERPAGTKVSNMFGGTREKCVGCDKTVYPIEKVSVNGTLYHKSCFKCTHGGCTISPSNYIAHEGKLYCKHHHIQLIKEKGNLSQLEGGDNAAKDKVDAA

SEQ ID NO: 2427 - protein, 1229 aa, Aspergillus oryzae
MSRSSAGFADFFPTAPSVLQQKRFKVTRERPRPKAQIDSEHSDESSACPTETRAILNLSNGGASLDSGQISSTDLKKTSPESSVEGSASSTAGDRSALSLSVAQHGANSHEARLDTLTPLTNAESSPPQKANSPRNKIAEGIVANTTIDTKSGINPLHTPPTPQSQGRRTGSIRGYKLVYDPDTEKRSSSKEKRRKPRYVDIILSEQNNCPPDPRLGIPNYMRGAGCKQKRKYRPAPYTLKPWPYDASSTIGPGPPAQIVITGFDPLTPIAPISALFSSFGDIGEINNRTDPITGRFLGICSVKYKDSASFRGGGPVLAASAARRAYYECRKEQRIGTRRIRVDLDRDGVVSERFVARTIESQRMGQKSNLQSTEEVKSDSETKKNEPPPTAPKGPSGKTSVRPIVAIPEGPRANFLKPVMPSLVEEVPILGQIKRDPYIFIAHCYVPVLSTTVPHLKKRLKLFNWKDIRCDKTGYYIIFENSRRGEEETERCYKMCHMKPLFTYIMNMESQPYGNPSYERSPSPERCRAEQRERAERERLKREVGLDIEEEKRQRAVDLDPCQEVLTIIIRDLKDKLLEDVKSRIAAPALYDYLDPDRHALKRKTLGIADPEGIKRPMFRIDDSFGTPDSRSGLSDARRPFSGSTPNILALPRIRKARHLGRTDTAFLDERRKQPLRRREVRPLYHRLQQLHDVDDSDDEQRTPKDTDEQDSRPPSRMSSGTSESDDGDGFVSEALGLPVVELAGSGQNKEPDEILKDNQSVGESSQLESNEISPELRKRKRASEELEARKRQKEDDELFGINPIAEAEVEGTQIIATPIAVDINLEVSEAALSILPKESNDNRQETGEANHLDFDGIDVTSSTIEKDRRGILDPLDDIDNAAAREESRTEVGWRVSNDEPRPIVDDDDAIIMDLDGWQNLIKDDEDLHFLRDILVGYSESNVGNLSAWAWRQKEIKALNHPGDVGPLRGGTGIAGYYVPNTTGAARTEGRKRILESEKSKYLPHRIKVQKAREEREARAKNDPHTAAVEAARVAAAKNISKSTSRSTRVNNRRLIADINAQKQALPTQSGDGDVLRFNQLKKRKKPVRFARSAIHNWGLYAEENISANDMIIEYVGEKVRQQVADMRERQYLKSGIGSSYLFRIDENTVIDATKRGGIARFINHSCTPNCTAKIIKVDGSKRIVIYALRDIERDEELTYDYKFEREWDSDDRIPCLCGSTGCKGFLN

SEQ ID NO: 2428 - protein, 252 aa, Malus x domestica
MCGGAIISDFIAVKRALKLTAEDLWSDLDTISDLLGIDYSNSINKQPENHKVVQKPKPSITKVVTSDEKPKQASGSAAAAKGKRVRKNVYRGIRQRPWGKWAAEIRDPYKAVRVWLGTYDTAEEAARAYDEAAVRIRGDKAKLNFAQPPSSSPLPSLAPDTPPPTKRRCIVAESTRVEPTQPSFQTGSYYYDPLYHGGGGGEMYAKKEVAGGDEVVVEQLSQVVSGSGESDSLYLWMLDDLVAYQQQGQLLY

SEQ ID NO: 2429 - protein, 444 aa, Zea mays
MTASFSSVAEVAVPAAAAVMASALPQEQQQARPRPRPMHAGGGGGGGGGANGRHHAYSRKDKSLGLLCSNFVVLYNRDDVESIGLDEAAKCLGVERRRIYDIVNVLESVGILVRKAKNRYTWIGFGGVSISLRELKERALREKSGLAPLQTEQQSAATISEDEDDDTLANPGAYIETERLSQTVDKPSGKPGASGCRLRSDHRKEKSLGLLTQNFVKLFLTMEVDTISLDEAAKLLLGEGHEETNMRTKVRRLYDIANVLSSLNLIEKIHQGDSRKPAFRWLGRATLNTENGVTVAVPPPGKIASKKRAFGTELTNIDMHRSNLDSKNKKKAKLVQSSGDVLTNCKLAVRSRLGQGKQSGFVYGPFHPSGARKHGLDGGNKPGQRERAEDWESLSASFRPQYQNQALSDLFVHYVDAWKTWYSEFAQGSSIMQQHFGHPVNHFL

SEQ ID NO: 2430 - protein, 124 aa, Oryza sativa (japonica cultivar-group)
MASPPRIEVEKLSVEQLKALKEQTDLEVNLLQDSLTKIRSAATRLENASAALHDLSLRPKGKKMLVPLTASLYVPGTLDDSEKVLVDVGTGYFIEKTMTEGKEYCERKINLLKSNFDELVEVCY

SEQ ID NO: 2431 - protein, 523 aa, Oryza sativa (japonica cultivar-group)
MSYHEEERHGGNGLDWFEESMSSLLAADVDLAGGGGDAGGGGYAWWWAASPAAQQDDIGSVVAQTLSPPSTAAPAAASPSIASPAASSPSDVPSSSSKKRKSPAHRAPGHTGGKKGGGGKGGGGGSDRDMRWAEQLLNPCAVAVEAGNLSRVQHLFYVLGELESFSGDANHRLAAHGLRALARWLPAAVGPAAAAAVRVPPCSERPTTAFAAAEPRLFRASLIRFHEVSPWFALPNALANAAIAQASTCGAAGATPRPLHVVDLGVSHGVQWPTLLESLTRQPGGRAPPSVRLTVVGPGATATSPVAPFSASPPGYDFSPHLLRYAKSINLDLRISRAATLDDAVPGDDGEALVVCLQFRLGHAAAEERREVLRKARGLNPELVVLSELDSGVGVVGGDGGSAAGEFAARLELLWRFLESTSAAFKGKDVEERRLLEAEAGAILAAADVAAAGEGREGWRERMAAAGFEEAPFGAEAVESARSLLRKYDSGWEMSAPSPAAAAVALRWKGQPVSFCSLWRPAA

SEQ ID NO: 2432 - protein, 324 aa, Oryza sativa (japonica cultivar-group)
MEPNYSDYHPNSVPFDAYYEHGHGHLDDHGHGHHHLIPAHPEPSYSYGNWSFLHADATATSSSESSSASASSGAAHIVGASGPSASFVRQLHFGGEYYDDDAADISALMEAASISCWTTNGGAGASTSQTTGLEGVEVMRRAAAPAPDNGSSDKEEAARPLIGVRKRPWGKYAAEIRDSTRNGARVWLGTFNTPEQAALAYDQAALSVRGPGAVLNYPLHRVRESLRTLELGAAAAASESPVLTLKRRHRIRKRSTTKKALAGKEADEAPATTSSEGKKKRQVNTTSHSHDGKQDQTSSPCVLELEDLGTDYLEELLALSEEQP

SEQ ID NO: 2433 - protein, 219 aa, Ageratina adenophora
MATLIPFNTPYTSLSADNIPTTESSSTSDYSTGTSFSDEEVMLASKNPKKRAGRKKFRETRHPVYRGVRRRDSGKWVCEVREPNKKTRVWLGTYPTADMAARAHDVAALAMRGRSACLNFADSLWRLPIPESSNVKDIQKAAVKAAEAFRPTETDVAVIEESNELTGNVFCVDDESIFEMQGFLADMAEGMMLPPPRTIEYDNCQDDLEFFVDASLWSF

SEQ ID NO: 2434 - protein, 379 aa, Glycine max
  misc_feature (77)..(77): Xaa can be any naturally occurring amino acid
  misc_feature (129)..(129): Xaa can be any naturally occurring amino acid
  misc_feature (222)..(222): Xaa can be any naturally occurring amino acid
  misc_feature (355)..(355): Xaa can be any naturally occurring amino acid
QKTKKNPSIPCTSMSSLSTHHTYSRKQKSLGLLCTNFLSLYNKEGVRLIGLDDAASRLGVERRRIYDIVNILESVGXLARKAKNQCTWKGFSAIHVALQELKDEGLKENPGSSDDSNPSINLVLTVLGXDDEDEEETFPNINTGSQNVMVKSSSKNENRREKSLALLTQNFVKLFVCSNFEMISLDEAAKLLLGNANNRTKVRRLYDIANVLSSMNLIEKVXTHTTNTRKPAFRWLGVRGKTWSESAQTNVKESQKRMFGSDITNINFKRKVDLSMDGQNFKTQNQQENISPRAQLEKKSLKKDAKQTSMSYQFGPFAPAYVHKVGTSENNSVKQVQDWESLAQEHRPQYQNQGXALKDLFSHYMEAWKSWYSEAAKTL

SEQ ID NO: 2435 - protein, 238 aa, Triticum aestivum
  misc_feature (111)..(111): Xaa can be any naturally occurring amino acid
  misc_feature (131)..(131): Xaa can be any naturally occurring amino acid
MAPRTSDKTATPPAAGAAATGLALGVGGGNGGGVGPHYRGVRKRPWGRYAAEIRDPAKKSRVWLGTYDTAEEAARAYDAAAREYRGNKAKTNFPFAPASAPPAAAAALTGXTAAGSSNSSTVESFGGDVQXPPWQAMPLPPSLDLDLFHRAATSTAGAGMRFPFSGYPVSHPYYFFGQAAAAAAAGCHMYSQAPKVTVASVSPSDSDSSSVVDLAPSPPTRKPVPFDLDLNCPPPAEL

SEQ ID NO: 2436 - protein, 203 aa, Clematis integrifolia
KRRNGLLKKAYELSVLCDAEVALIVFSSRGRLYEYSNNSVRKTIERYKKASSDTSNTGSVSEANAQFYQNEAGKLRNQIASLQNNNKNLLGESLSNLSIRELKQLEKKIEGGITKIRSKKNELLFAEIEYMQKREIDLQNDNLYLRAKIADNERTQQQMNLMPGNEYEVISSAPFDSRNFLPVNLLEPNNSYSHCDQTTLQLG

SEQ ID NO: 2437 - protein, 98 aa, Glycine max
  misc_feature (11)..(11): Xaa can be any naturally occurring amino acid
DEAARRGKVYXKYMCSFLFNLNNDFVVDATRKGNKICFANHSVNPNCYAKVMMVNGDPRIGIFAKRAIQTGEELFFDYRYSQADALKYVGIEREMEIP

SEQ ID NO: 2438 - protein, 216 aa, Ranunculus ficaria
IENTTNRQVTFCKRRNGLLKKAYELSVLCEAEVALIVFSNRGRLYEYSNNSVKKTIERYKKHSTDSSNTGSVSEANAQFYQQEANKLRNQIATLQNSNKNLLGESLSNLSVRELKAIEKKIEGGIAKIRSKKNELLFAEIEYMQKREIDLQNDNMFLRAKIAENERTQQQHMSLMPVNDYEVISSAPYDSRNFLPVNLLDSNHNYSRNDQTTLQLG

SEQ ID NO: 2439 - protein, 246 aa, Olimarabidopsis pumila
MLKSVSAMPFYEIGEQQYSTLGYIISKPGNAGLYDIDPPIPTIDDAIYGSDEFRMYAYKIKRCPRTRSHDWTECPYAHRGEKATRRDPRRYTYCAVACPAFRNGACHRGDSCEFAHGVFEYWLHPARYRTRACNAGNLCQRKVCFFAHAPEQLRQSEGKHRCRYAYRPVRTRGGNSDAMAVRMEGEDYDTSRSPEKSGKGGLDSNEEKVLFKCWSRMNIVDDHYEPSDLDLDLDLSHIDWISELVD

SEQ ID NO: 2440 - protein, 203 aa, Ranunculus ficaria
KRRNGLLKKAYELSVLCEAEVALIVFSNRGRLYEYANNSVRKTIDRYKKQCSDASTALTVSEANSLFYQQESSKMKQQIDILQNSNRHLMGEALSCLSIKELKQLESRLEKGLSRIRSKKNEMLLAEIEYVQKREIDLHNDNVYLRQKISENERAQQHMNSLPGNAYEAMTSAPYDARNFLQVNLSDNKDNHYGSSSTALQLC

SEQ ID NO: 2441 - protein, 200 aa, Saxifraga careyana
KRRNGLLKKAYELSVLCDAEVALIVFSTRGRLYEYANNNIRSTIERYKKANSDSLNTGDVVETNTQFYQHESVKLRQQIQMLQNSNRNIMGESLSSLTLKELKQLENRLERGITRIRSKKHEMLLAEIEYMQKREIDLENESIYLRAKIGEAESIEQANVAAANDLHAIQAYVAHNFFQPSLLDAEPSFGYPNKKSPRLG

SEQ ID NO: 2442 - protein, 255 aa, Malus x domestica
MGRGRVQLKRIENKINRQVTFSKRRSGLMKKAHEISVLCDAEVALIIFSTKGKLFEYSNDSCMERILERYERYSYTERQLLANDNESTGSWTLEHAKLKARVEVLQRNQRHYMGEDLQSLSLKELQNLEQQLDSALKHIRSRKNQVMYESISELQKKDKALQEQNNLLAKKVKEKENAVAQQAQLEHVQEQRLNSSSSLLPRALQSLNFGSGSNYQAIRSSEGIPGDNQQYGDETPTPHRPNMLLPAWIVRHLNE

SEQ ID NO: 2443 - protein, 212 aa, Saxifraga careyana
KRRNGLLKKAYELSVLCDAEVALIVFSTRGRLYEYSNNSVKQTIERYKKACSGPSNSGSVSEANAQSYQQEASKLHAQINNLQNTNRQMLGEALGSLSPRDLKNLENKVEKGISKIRSKKNELLFSEIEYMKKREIDLHNENQYIRAKIAETERAQQQMSLMPPGGGSTNYDQQLNMHPQQFDSRDFFQVNALQPNNHHYSRQHDQISLQLV

SEQ ID NO: 2444 - protein, 207 aa, Olimarabidopsis pumila
MATFEDGSDLEAIQKHLFEDLLVCDGFMGDFDFDASFVSGLWCIEPQVPKQEPDSPVLDPDSFVNEFLQVEAESSPSSPELNTSPLSTYETDQSVKKAERFEEEEEARHYRGVRRRPWGKFAAEIRDPAKKGSRIWLGTFESDVDAARAYDCAAFKLRGRKAVLNFPLDAGKYEAPANSGRKRKRSDVQEELQRTQSNSSSSSCDAF

SEQ ID NO: 2445 - protein, 263 aa, Zea mays
MTKKLISISTMAGKQGCKEQSNDRRIQASIQGDAKSVVVGFGGRLVTREQEQEDAIIVAALRHVVSGYSTPPPEVVVTVAGGEACGTCGIDGCLGCDFFGAPELAQEAVSCGTGQVATTASVGGGAAAAALRPRRRRNRNMYRGVRQRPWGKWAAEIRDPRRAARVWLGTFDTAEEAARAYDCAAVEFRGPRAKLNFPGHEALFQGHGDTAAAADTETLTPSPGEWQLGGGAGDELWEGLQDLMKQDEVDRWLAPVFGAASSF

SEQ ID NO: 2446 - protein, 324 aa, Solanum tuberosum
MVFSSFPVYLDHPNLHQLQQPDGHQQGNTGLENPTLQPPPMQVGASPGSIRPGSMVDRARLAKIPLPEAGLKCPRCDSTNTKFCYFNNYNLSQPRHFCKTCRRYWTRGGALRSVPVGGGCRRNKRSKSNNNNNSSKTAGSNVNTNTIASGTSTSASPSSCSTEIMNGRHHFSHEQPPQLTPLMAAFQNLNHHYGGFQPPPLVSTHHGNGTGALGHHHEMGFQIGSSTNTNNLPVPPGGGSDHQWRLPSLAANTNLYPFQHGTDQGIHESSSVNNNNINAHDDQGLNSTKQFLGTMENNTNQYWGGNAWTGFSGLNSSSSASHLL

SEQ ID NO: 2447 - protein, 613 aa, Poa pratensis
MAMKGGPAESRTRSTVSICIVVGMCVFFYILGAWQKSGFGKGDSIALEITKRTDCTILPISYDTHHSKKGSSGDLVSPVKKFKPCPDRFTDYTPCQDQNRAMKFPRENMNYRERHCPLQKEKLHCLVPPPKGYVAPFPWPKSRDYVPFANCPYKSLTVEKAIQNWVQYEGNVFRFPGGGTQFPQGADKYIDQLAAVIPIANGTVRTALDTGCGVASWGAYLLKRNVLAMPFAPRDSHEAQVQFALERGVPAVIGVLGTIKLPYPSRAFDMAHCSRCLIPWGLNDGLYMMEVDRVLRPGGYWVLSGPPINWKVNYKGWQRTKKDLEAEQNKIEEIAELLCWEKVSEKGETAIWRKRVNTESCPSRHEESTVQMCKSTNADDVWYKTMKACVTPLPDVENPSEVAGGAIKPFPSRLNAIPPRIANGLIPGVSSQAYEKDNKMWKKHVKAYSNVNKYLLTGRYRNIMDMNAGFGGFAAAIESPKSWVMNVVPTIGKIATLGSVYGRGLIGIYHDWCEAFSTYPRTYDLIHASGLFTLYKNKCSLEDILLEMDRILRPEGAVIMRDDVDILTKVDKFARGMRWNTRLVDHEDGPLVREKVLYAVKQYWVGGNQTAST

SEQ ID NO: 2448 - protein, 319 aa, Oryza sativa (japonica cultivar-group)
MMASCRRGGGGDVDRIKGPWSPEEDEALQRLVGRHGARNWSLISKSIPGRSGKSCRLRWCNQLSPQVEHRPFTPEEDDTILRAHARFGNKWATIARLLAGRTDNAIKNHWNSTLKRKHHSSLLADDLRPLKRTTSDGHPTLSSAAAPGSPSGSDLSDSSHHSLPSQMPSSPPHLLLPQHVYRPVARAGGVVVPPPPPPPPPATSLSLSLSLPGLDHPHPDPSTPSEPAVQLQPPPPSQMPPPTPSCVRQEPPQMPFQLQPPPPPRPSAPFSAEFLAMMQEMIRIEVRNYMSGSAAVDPRSSPDNGVRAASRIMGMAKIE

SEQ ID NO: 2449 - protein, 333 aa, Craterostigma plantagineum
MNQQQVKVSKNNKQVNNCEDDDDSSDLRRGPWTVDEDFTLINYIAHHGEGRWNSLARFAGLKRTGKSCRLRWLNYLRPDVRRGNITLEEQLLILELHSRWGNRWSKIAQHLPGRTDNEIKNYWRTRVQKHAKQLKCDVNSKQFKDTMRYLWMPRLVERIQASATTDDGAPPAVVSSPSSAMNTACYTTAMAAGDHRRQFMLMPQYYATTTTTHNNSMIAQENSSTVASSESFGSLSSELTAEANYANYHRVINGADHQQIDSSTTSYGWQNCAVGNNGNSDQLGMGFADDRRSNEQWMMMTDDVVDNGGSSDQDNNLWNVDDVWFLQQFSSCF

SEQ ID NO: 2450 - protein, 168 aa, Arabidopsis thaliana
MEVTNGLNLKDTELRLGLPGAQEEQQLELSCVRSNNKRKNNDSTEESAPPPAKTQIVGWPPVRSNRKNNNNKNVSYVKVSMDGAPYLRKIDLKMYKNYPELLKALENMFKFTVGEYSEREGYKGSGFVPTYEDKDGDWMLVGDVPWDMFSSSCQKLRIMKGSEAPTAL

SEQ ID NO: 2451 - protein, 113 aa, Pelargonium zonale
WSKYGQKMAKGNPCPRAYYRCTMAAGCPVRKQVQRCAEDRTILITTYEGNHNHPLPPAAMAMASTTSSAARMLLSGSMPSADGIMNSNFLTRTLLPCSSSMATISASAPFPTV

SEQ ID NO: 2452 - protein, 532 aa, Medicago truncatula
MQTSLNHKMSYDSSMFNIEPIRNLDSYCFLQNENLENYSSSDNGSHSTYPSFQALEQNLESSNNSPVSKLQSKSYTFTSQNSLEIINDSLENESCLTHNQDDLWHKIRELENAMLGQDAADMLDIYNDTVIIQQESDPLLLEAEKWNKMIEMISRGDLKEILFTCAKAISENDMETAEWLMSELSKMVSVSGNPIQRLGAYMLEALVARIASSGSIIYKSLKCKEPITATSKELLSHMHVLYEICPYLKFGYMSANGVIAEALKDESEIHIIDFQINQGIQWMSLIQALAGKPGGPPKIRITGFDDSTSAYARGGGLGIVGERLSKLAESYNVAFEFHAIGVSPSEVRLEDLELRRGEAIAVNFAMMLHHVPDEDVHGGKNHRDRLVRLAKCLSPKVVTLVEQESNTNELPFFARFVETMNYYFAVFESIDVALPREHRERINVEQHCLAREVVNLVACEGAERVERHEVLKKWRSCFTMAGFTPYPLSSYINYSIQNLLENYQGHYTLQEKDGALYLGWMNQPLITSSAWR

SEQ ID NO: 2453 - protein, 349 aa, Oryza sativa
MELELSLGDSPAPVKATIAPTPVLIPTCMGDEEDLELVLGVRATRRDEQDDQTTCTQSSEEAMEGEEDETRPHGEAPVESLSFPLFVSSAETGSANSEMCTRGFDVNTRPADGGAEAGRPSSPSSMQEASTRQQVADQEAADDEDNGGGGARKKLRLSKEQSSFLEDSFKEHSTLTPKQKSDLANRLNLRPRQVEVWFQNRRARTKLKQTEVDCEHLKRCCERLTRENRRLQREVAELRGALRTTTSSYPPLYGLHHLPAAAGTVFRVCPSCEHSKVVAAAASESFSPRVFAGGGAPAAITAAAAVPSPGAGSPPSSSAALFGARRPHFGPFAAAVIPPVLRRQPSATS

SEQ ID NO: 2454 - protein, 384 aa, Brassica rapa
MELKEGSNQISEIEEGENKRDRYKRSANMRRSPCSDDSGLKKGPWTPEEDEKLVNYIQKHGHSSWTALPKRAGLNRCGKSCRLRWTNYLRPDIKRGRFSPEEEQTILNLHAVVGNNQRFCVPVLLAYVDNVIRWSTIANNLPGRTDNEIKNFWNTHLKKKLIQMGVDPMTHRPRPDIFSSLSQLVSMSSNLRGFVDMQLQFQTDQEQTILKLQTEMAKLKLLHDLLQPPSMNNNTNPNDFDTRSLLHSIASLKETYTTSNNPDLGPYLQDFSSIPSLETLNTNMVPSSISPRDLEDSHFKFFSQRDNLPVSPVWLSDPSSSNQSLLPSLDHSSVVSGDLIRNQYIIEDVNSNLMTSSSGQESGASASPVWPDHLLDDSIFSNIL

SEQ ID NO: 2455 - protein, 193 aa, Zea mays
MRRAKPPPQQPSPSPEIRYRGVRRRPSGRYAAEIRDPAKKTPIWLGTYDCAEAAAHAYDAAARSLRGPTARTNFPSAAVRAPRHRAPSASAAAPTAPAAAATSSHSSTVESWSGGAPRAAALPRSAVPMEEDDDEDCHSYCGSSSSVLCDDACGDDAVASRAPLPFDLNLPPPLDAAAETHQMGARYDTLLRL

SEQ ID NO: 2456 - protein, 931 aa, Zea mays
MEAEAAAAVVASSASASASAGRSRPSSSAAQVTSNSAVRAGEENAASLYVLSVIDSLKKRITADRLTYIKNRIGENKTNISSYTQRTYNLSKNRQISTSKGTDSASNLLTKRQDDALCTLHSLDIIPVDKDGGTFQDESPFSSSNVMFGGNLGPKNAIIRPIKLPEVPKLPPYTTWIFLDRNQRMTEDQSVLGRRRIYYDTSCGEALICSDSEDEAIEDEEEKKEFKHSEDHIIRMTVQECGMSDAVLQTLARHMERAADDIKARYEILHGEKTKDSCKKGTEHNVKVEDLYCDKDLDAALDSFDNLFCRRCLVFDCKLHGCSQDLVFPTEKQPAWSGVDDSVPCGIHCHKLASEPDSAAGADHMLFDVEEPTHSSDNVMNQPGSNRKKNGSSGRKTKSQQSESSSTARVISESSDSEVHPISNKSPQHSPSPSKVKIGPKGGIRKITNRRIAERILMSVKKGQREMASSDSNFVSGYLLARDMKLRSDTRNGNKELIVSSQQSSPSTRSSKKKSTPQIGNSSAFAEAHNDSTEEANNRHSATDGYDSSRKEEFVNENLCKQEVYLRSWKAIEQGLLVKGLEIFGRNSCLIARNLLGGMKTCKDVFQYMNYIENNSASGALSGVDSLVKGYIKGTELRTRSRYFRRRGKVRRLKYTWKSAGYNFKRITERKDQPCRQYNPCGCQSTCGKQCPCLSNGTCCEKYCGCPKICKNRFRGCHCAKSQCRSRQCPCFAADRECDPDVCRNCWVGCGDGTLGVPNQRGDNYECRNMKLLLKQQQRVLLGRSDVSGWGAFLKNSVSKHEYLGEYTGELISHKEADKRGKIYDRENSSFLFNLNNEYVLDAYRMGDKLKFANHAPDPNCYAKVIMVTGDHRVGIFAKERILAGEELFYDYRYEPDRAPAWARKPEASGAKDDGQPFNGRAKKLAQNNRG

SEQ ID NO: 2457 - protein, 247 aa, Datisca glomerata
MALEALNSPTTATPVFHYDDPSLNYLEPWTKRKRSKRTRLDSPHTEEEYLAFCLIMLARGRVASANRRDSQSSIQIQPEATTSATKVSYKCSVCDKAFSSYQALGGHKASHRKLAGGEDQSTSFATTNSATVTTTTASGGGGRSHECSICHKSFPTGQALGGHKRCHYEGSIGGNSIHHHNNTTNSGSNGGMSMTSEVGSTHTVSHSHRDFDLNIPALPEFRSNFFISGDDEVESPHPAKKPRILMK

SEQ ID NO: 2458 - protein, 245 aa, Arabidopsis thaliana
  misc_feature (236)..(236): Xaa can be any naturally occurring amino acid
MDYSSMHQNVMGVSSCSSQDYQNQKKPLSATRPAPPEQSLRCPRCDSTNTKFCYYNNYSLSQPRYFCKSCRRYWTKGGILRNIPIGGAYRKHKRSSSATKSLRTTPEPTMTHDGKSFPTASFGYNNNNISNEQMELGLAYALLNKQPLGVSSHLGFGSSQSPMAMDGVYGTTSHQMENTGYAFGNGGGGMEQMATSDPNRVLWGFPWQMNMGGGSGHGHGHVDQIDSGREIWSSTXNYINTGALL

SEQ ID NO: 2459 - protein, 247 aa, Arabidopsis arenosa
MLKSVSPMAFYDIGEQQYSTFGYIVSKPGNAGAYEIDPPIPNIDDAIYGSDEFRMYAYKIKRCPRTRSHDWTECPYAHRGEKATRRDPRRYTYCAVACPAFRNGACHRGDSCEFAHGVFEYWLHPARYRTRACNAGNLCQRKVCFFAHAPEQLRQSEGKHRCRYAYRPVRARGGGNGDGVAMRMDGEDYDTSRSPVRSGKDDLDSNEEKVLLKCWSRMSIMDDHYEPSDLDLDLDLSHFDWISELVD

SEQ ID NO: 2460 - protein, 233 aa, Allium sp. AL-2003
VQLKRMENKINRQVTFSKRRNGLLKKAHEISVLCDAEVALIVFSAKGKLYEYSTDSSMEKILERYERYCFAEKSSTMSDIDSQEDWSLEYHKLKAKVESLNNRQRHLMGEQLESLSLREIGQLEQQLENSLKTVRTRKSQELLSSISELQDKEKTLRDENKALENELMKRARAKAILEQQARWKHHNHKQQDNLHNPNINIGNYQTRNNEGGVEPATDVQVRVVRNLLPHWML

SEQ ID NO: 2461 - protein, 616 aa, Oryza sativa (indica cultivar-group)
MAVKASSADNRTRSTVSLCIVIGMCCFFYILGAWQKSGFGKGDSIALEITKRTDCTILPNLSFDTHLAKQARPRDLVLPAKKFKPCPDRYTDYTPCQDQNRAMKFPRENMNYRERHCPPQKEKLHCLIPPPKGYVAPFPWPKSRDYVPFANCPYKSLTVEKAIQNWVQFEGNVFRFPGGGTQFPQGADKYIDQLASVVPIANGTVRTALDTGCGVASWGAYLLKRNVLAMSFAPRDSHEAQVQFALERGVPAVIGVLGTIKLPYPSRAFDMAHCSRCLIPWGANGGIYMMEVDRVLRPGGYWVLSGPPINWKVNYKGWQRTKKDLEAEQNKIEEIADLLCWEKVKEIGEMAIWRKRLNTESCPSRQDESSVQMCDSTNADDVWYKKMKPCVTPIPDVNDPSEVAGGAIKPFPSRLNAVPPRIANGLIPGVSSQAYQKDIKMWKKHVKAYSSVNKYLLTGRYRNIMDMNAGFGGFAAAIESPKSWVMNVVPTISKMSTLGAIYERGLIGIYHDWCEAFSTYPRTYDLIHASGLFTLYKNKCNMEDILLEMDRVLRPEGAVIMRDDVDILTKVNRLALGMKWNTRLVDHEDGPMVREKVLYAVKQYWVGGNQTAAAAA

SEQ ID NO: 2462 - protein, 125 aa, Brassica napus
  misc_feature (5)..(5): Xaa can be any naturally occurring amino acid
  misc_feature (7)..(7): Xaa can be any naturally occurring amino acid
  misc_feature (10)..(10): Xaa can be any naturally occurring amino acid
  misc_feature (25)..(25): Xaa can be any naturally occurring amino acid
  misc_feature (35)..(35): Xaa can be any naturally occurring amino acid
  misc_feature (47)..(47): Xaa can be any naturally occurring amino acid
  misc_feature (85)..(86): Xaa can be any naturally occurring amino acid
  misc_feature (94)..(94): Xaa can be any naturally occurring amino acid
HSSPXWXSAXEFLDEKAVKSQKKKXQFSSLEVQSXTRRCSHCGVQKXPQWRAGPLRAKTLCNACGVRFKSGRLLPEYRPACSPTXXTELHSNHXRKVIEMRQKKEMSGDADKPGMNRTVQAVRSF

SEQ ID NO: 2463 - protein, 256 aa, Brassica oleracea var. italica
MGRGRVQLKRIENKINRQVTFSKRRAGLFKKAHEISVLCDAEVALVVFSHKGKLFEYSTDSCMEKILERYERYSYAERQLIAPESDVNTNWSMEYNRLKAKIELLERNQRHYLGEDLQAMSPKELQNLEQQLDTALKHIRSRKNQLMYDSVNELQRKEKAIQEQNSMLSKQIKEREKVLMAQQEQWDQQNHGQNMPSPPPPQQHQIQHPYMLSHQPSPFLNMGGLYQEEDPMAMRRNDLDLSLEPVYNCNLGCFAA

SEQ ID NO: 2464 - protein, 173 aa, Arabidopsis thaliana
MPTLYKKAGCQFQLTTMNNQNVDDHNLLLISQLYPNVYTPLVPQQGGEAKPTRRRKRKSKSVVVAEEGENEGNGWFRKRKLSDEQVRMLEISFEDDHKLESERKDRLASELGLDPRQVAVWFQNRRARWKNKRVEDEYTKLKNAYETTVVEKCRLDSEVIHLKEQLYEAEREI

SEQ ID NO: 2465 - protein, 212 aa, Antirrhinum majus
KAHELSVLCDAEVALIIFSNRGKLYEFCSSTSMLNTLERYQKCNYGPPETNVSTREALELSSQQEYLKLKARYEALQRSQRNLLGEDLGPLNSKELESLERQLDMSLKQIRSTRTQAMLDTLTDLQRKEHALNEANRSLKHRLMDGSQISLQWNPNAEDHVGYGRQPSQPSADGFYHPLECEPTLHIGFQSDQITVAGAGPSVNNYISGWLP

SEQ ID NO: 2466 - protein, 394 aa, Oryza sativa (indica cultivar-group)
MAKQSCCHKKKLRRGLWSPEEDEKLMNHIAKYGHGCWSSVPKLAGLERCGKSCRLRWINYLRPDLKRGTFSQEEEDLIIQLHSMLGNKYVLYSSSTHICQSLSRSVPSLTMAAATATALARWSQIAAQLPGRTDNEVKNFWNSYIKKKLRDRGIDPATHKPLAADSSATPTNTTAAAASRSTATCRAVFSDAELQIPTAAAVQQQQQAPLVGAMQLVDGIKMPLDDYWPAAAAPSSSTTTFSAYHHALSMQQQAAAGCGGAAAFDMDALSHCGVVVAPSASSSSTLTSMAGLSPAAADAAEQSANVAAAAATTTNLPWLDLGHANPIATMDHYAGVLDELRWSDYFDGAYQAATTATQGGALQGQCLYDGGGGGGKDVDDAVQFVDVHSLSNWC

SEQ ID NO: 2467 - protein, 207 aa, Antirrhinum majus
  misc_feature (192)..(192): Xaa can be any naturally occurring amino acid
CDAEVALIIFSNRGKLYEFCSSSSSMLTTLERYQKCNYGAPDHANISTREAMELSSQQEYLKLKARYEALQRSQRNLLGEELGPLNSKELESLERQLDMSLKQIRSTRTQAMLDTLTDLQRKEHALNEANRNLKHRLMEGSQIGLQWNLNAQDMGYGRQPTQPQGDGFFHPLECEPTLQMGFHSDQISVAAXAGPSVNNNYMSGWLP

SEQ ID NO: 2468 - protein, 204 aa, Antirrhinum majus
DAEVALIIFSNRGKLYEFCSNSGTMLKTLERYQKCNYGAPEANVSTREALELSSQQEYLKLKARYEALQRSQRNLLGEDLGPLNSKELESLERQLDMSLKQIRSTRTQAMLDTLTDLQRKEHALNEANRSLKHRLMEGSQISLQWNPNAHDMGYGRQAAAQPQGDGFFHPLECEPTLQMGFQSEITVGAAGPSVNNYNMTGWLP

SEQ ID NO: 2469 - protein, 109 aa, Oryza sativa
ALVAEKKNVPEIGRITGEEWKAMSEAEKAPFEAAARKQREEYQVEMAAYRQRKQEEAACQEKEEEEQKKIMKQEALQLLKKKEKAATPPPVRPPRPRPSRHGWRWWWWS

SEQ ID NO: 2470 - protein, 208 aa, Glycine max
  misc_feature (104)..(104): Xaa can be any naturally occurring amino acid
MVKEKKNVVVKNKKPNNNADELHFRGVRKRPWGRYAAEIRDPGKKTRVWLGTFDTAEDAARAYDAAARNFRGPKAKTNFPVPPDDNNNNNVNVNKNKSVNVKSXSPSQSSTVESATPEREATRRSTSAAIDRFPFLPIQQQILMTHPVAAPMRPVFFLDRAHFMTQSFPLRFEPGPVQSDSDSSSVVVDCQPKRELNLDLNLAPPNEY

SEQ ID NO: 2471 - protein, 188 aa, Eucalyptus globulus
MAFAGTTQKCMACEKTVYLVDKLTADNRIYHKACFRCHHCKGTLKLGNYNSFEGVLYCRPHFDQLFKRTGSLEKSFEGTPKIAKPEKPVDGERPAATKASSMFGGTRDKCVGCKSTVYPTEKVTVNGTPYHKSCFKCTHGGCVISPSNYVAHEGKLYCRHHHTQLIKEKGNLSQLEGDHERETMAPES

SEQ ID NO: 2472 - protein, 302 aa, Arabidopsis thaliana
MANNNNIPHDSISDPSPTDDFFEQILGLSNFSGSSGSGLSGIGGVGPPPMMLQLGSGNEGNHNHMGAIGGGGPVGFHNQMFPLGLSLDQGKGHGFLKPDETGKRFQDDVLDNRCSSMKPIFHGQPMSQPAPPMPHQQSTIRPRVRARRGQATDPHSIAERLRRERIAERIRSLQELVPTVNKTDRAAMIDEIVDYVKFLRLQVKVLSMSRLGGAGAVAPLVTEMPLSSSVEDETQAVWEKWSNDGTERQVAKLMEENVGAAMQLLQSKALCIMPISLAMAIYHSQPPDTSSSIVKPEMNPPP

SEQ ID NO: 2473 - protein, 190 aa, Zea mays
  misc_feature (99)..(99): Xaa can be any naturally occurring amino acid
  misc_feature (117)..(117): Xaa can be any naturally occurring amino acid
  misc_feature (119)..(119): Xaa can be any naturally occurring amino acid
  misc_feature (138)..(140): Xaa can be any naturally occurring amino acid
HKTILPFSIHFITKKASLNSPSCFLPERSSDSNLLMALEAISSPRLASPVPPLFEDSSRFHGVDHWTKGKISKRSRSDFHHKNLTEEEYLAFCLLLLAXRDGDRSNRNPLPPPPVTXGXEKSSTYTCSVCDKSFSSYXXXLGGHKASHRKNLSQTYSGGRRRFNRRRPHPRKKKGKSLTVCSSGQSRFPS

SEQ ID NO: 2474 - protein, 314 aa, Glycine max
MKRLNSSDSSTALMTIFPSSSTEEHSPRNSHHMYGREFRSMLDGLDEEGCVEEPGHQSEKKRRLSVEQVKALEKNFEVENKLEPERKVKLAQELGLQPRQVAVWFQNRRARWKTKQLERDYGVLKANYDALKLNFGTLNQDNEALRKQIKELKSRLLQEENTAGSGVSVKEEEITTMPADSEEKTMEQSKSDPPSETSNINPSSESSEEDHLNYECFNNNSDDCVVGGSAAASLLQVDFMKDGSSDSDGSSAILNEDTMYLPSSMNCFQFQKPYHHAQYVKTEEHNFLSADEACNFFSDEQAPTLQWYCPEQWS

SEQ ID NO: 2475 - protein, 427 aa, Arabidopsis thaliana
MENFVDENGFASLNQNIFTRDQEHMKEEDFPFEVVDQSKPTSFLQDFHHLDHDHQFDHHHHHGSSSSHPLLSVQTTSSCINTAPFEHCSYQENMVELYETKPNLMNHHHFQAMENSYFTRNHPHHHQEINLVDEHDPMDLEQNNMMMMRMIPFDYPPTETFKPMNFVMPDEISCVSADNDCYRATSFNKTKPFLTRKLSSSSSSSSWKETKKSTLVKGQWTAEEDRVLIQLVEKYGLRKWSHIAQVLPGRIGKQCRERWHNHLRPDIKKETWSEEEDRVLIEFHKEIGNKWAEIAKRLPGRTENSIKNHWNATKRRQFSKRKCRSKYPRPSLLQDYIKSLNMGALMASSVPARGRRRESNNKKKDVVVAVEEKKKEEEVYGQDRIVPECVFTDDFGFNEKLLEEGCSIDSLLDDIPQPDIDAFVHGL

SEQ ID NO: 2476 - protein, 242 aa, Gerbera hybrid cultivar
MGKGRLELKRIENKINRQVTFAKRRNGLLKKAYELSVLCDAEVALIVFSTRGKLYEFSSTSSMLKTLERYEKCSFGPPEQRRPAAKEDLQEQSSYQEYMRLKERYDALKRLERNYYGEEIDSLTTSELESLERQLHCSLKQIRTIRTQSLLDKLYEQQKMEHQLYESNKTLRLRLDEEGQAEALQWDAHAHANGMVYAHQHQVSQPMRDTFYHPTGCETTLQIGYQSEQMSAVNHQMQGWPA

SEQ ID NO: 2477 - protein, 1755 aa, Brassica rapa
MKSSLPPAYRGRSATNRHPSLPSASTNCRNFRSPPLNHRQYPSSSFPPNYRRDRPPATPNFIVQLVHPRTPAAEPSPSFSVRKQVISTLASLCGIPEESVHVPQFGCIAGSFSFRQWVDALSAVVALWEYRLQGKTLLVPELVANVTVPSDMEELRDRLRGLFSGHVLSILDNGDCVKKVRAEIEEKTRQVESFSSKRGIKLEAFERKKAIEAERDLVVKRLEEFKNGMKSIVRFLEGRDGEKDDVAVFSLEGDYDWPRIHSLIRRECRRLEDGLPIYAYRRNILKRIHGEQVMVLIGETGSGKSTQLVQFLADSGVAATESIVCTQPRKIAALTLADRVREESNGCYEENSVRCTPAFSSTEEISSKVVFMTDNCLLQHYIKDRSLPGVSCVIIDEAHERSLNTDLLLALLKDLMCRRIDLRLVIMSATADAYQLSDYFFGCGILCVTGRNFPVEIIYSPSDAEGSSGTGRIAPYADDVVKKAVEVHKTEKEGTILAFLTSQAEVEWACERFIAPSAVALPLHGKLSFEEQFRVFQNHPGKRKVIFATNIAETSLTIPGVKYVIDSGMVKESKYEPRTGMSILRVCRVSQSSARQRAGRAGRTEPGRCYRLYSKHEFESMNLNQEPEIRRVHLGVALLRILALGVDSVADFDFVDAPVPEAIAMAVKNLVQLGAVVEKNGVLELTQEGHCLVKLGLEPKLGKLILGCFRHRMGKEGIVLAAVMANASSIFCRVGSLDDKMKADCLKVQFCNPNGDLFTLLSVYKEWASLPRERRNKWCWENSLNAKSMRRCEDTVKELEICIERELSLVSPSYWVWNPTEGNNNKHDKRLKTVILASLAENVAMYTGYDQLGYEVALTGQQVQLHPSCSLLAFGQKPTWVVFGELLSIVDQYLVCVTSFDFEALSLLDPPPPFDASHMDEWRLRVEKVAGCSSTLLKRFCGKSNCGLLSIVSRARLLCVDERISIQVDVDQNEILLYAPPHDMDKVSALVSDALECEKKWMRNECLEKYIYHGRGQVPMALFGSGAQIKHLEVDQRFLTADVFYYGDSFVDDRELLRFLERKIDVCICSIHKFAGNKQDCDEKDKWGRITFLTPESAMKATEIQRFDFNGSVLKLFPSLATGGGGMFKMPSFPSVTAMIRWPQRESTGRGVLKCPSGDVHSVFNGTSDIVIGTRYARFETDQRFSDSVLITNIDSGLVEADVLDALEFYTGRTDLEFFLLRRKSVRSPPPTVCADMLHKRIFACMSSSSPEPNCVQVKVFEPKETDYFMRALITFDGRLHLEAAKALEELDGEVLPGCLSWQKIKCEQKFQSSIICPASVYNIVKRQLNAKLTSFERQRGGTWHLEPTHGGAYRVRISAYATKPISEMRRSLEELVRGRPINHPGLTPRVLQHLSSRDGVILMRRIQHETETYILLDRHSLTVRICGSEEKIAAAEQELVRSLLVYHERQQLEIRLRGPQLRPDLMKEVVNRFGPDLQGIKEKVNGVDLKLNTRYHVIQVHGSVEMRQEVEKIVYELAREGSEPGGKPDDIEVECPICLCEVDDGYSLEGCSHLFCKACLLEQLEASMRNFDAFPILCSHTDCGAPIVLADMRALLSQEKLDELFKASLSSFVTTSDGNFRFCSTPDCPSVYRVAVGPRESGEPFICGACNAETCRRCHLEYHPYITCERYKLFKEDPDMSLKDWAKGKNVKECPFCKSTIEKSDGCNHLLCRCGKHICWVCLDFFTHQEPCYEHLRAVHGGIGIFDELGIPLL

SEQ ID NO: 2478 - protein, 227 aa, Phalaenopsis hybrid cultivar
IKRIENTTNRQVTFCKRRNGLLKKAYELSVLCEAEIALIVFSSRGRVYEYSNNSIKATIEKYKKTCAGSSNPGSLVEVNSHQYYQQESAKMRHQIQLLQNSNRHLMGDGLSSLNLKELKQLENRLERGITRVRSKKHELLFAEIEYMQKREVELQNDNMYLRAKIADNERAQQANIVQAGVDFESIPSFDSRNYYHINMLESASHYSHHQDQTALHLGYETKADQSA

SEQ ID NO: 2479 - protein, 256 aa, Brassica oleracea var. italica
MGRGRVQLKRIENKINRQVTFSKRRAGLMKKAHEISVLCDAEVALVVFSHKGKLFEYSTDSCMEKILERYERYSYAERQLIAPESDSNTNWSMEYNRLKAKIELLERNQRHYLGEDLQAMSPKELQNLEQQLDTALKHIRSRKNQLMYDSINELQRKEKAIQEQNSMLSKQIKERENVLRAQQEQWDEQNHGHNMPPPPPPQQHQIQHPYMLSHQPSPFLNMGGLYQEEDQMAMRRNDLDLSLEPVYNCNLGCFAA

SEQ ID NO: 2480 - protein, 207 aa, Arabidopsis arenosa
MASFQESSDLEAIQSHLFEDLLVCDGFMGDFDFDASFVSGLWCIEPQVPKQEPDSPVLDPDSFVNEFLQVEGESSSSSPELNSSSSSTYETDQSVKKAERFEEEEEARHYRGVRRRPWGKFAAEIRDPAKKGSRIWLGTFESDVDAARAYDCAAFKLRGRKAVLNFPLDAGKYEAPANSGRKRKRSDVQEELQRTQSNSSSSSCDAF

SEQ ID NO: 2481 - protein, 203 aa, Clarkia concinna
RHELSMLCDAEVALIVFSTKGKLFEYSTDSSMEKILERYERYSYAERQLATNDSDPQGSCWTFECPKLMAKIEVLQRNIRHYVGEDLDPLSQRELQSLEQQIDTAIKRIRTRKNQLMHETISELHKKEKVLQEQNNLLSKKLKDNENALAERAQREQEFGQNTSNFMFPPATPPLLLHSLTIGGTFQGNVAPGKENEAQVRPS

SEQ ID NO: 2482 - protein, 217 aa, Chelidonium majus
  misc_feature (211)..(211): Xaa can be any naturally occurring amino acid
VKKAHEISVLCDAEVGLIVFSTKGKLFEFSSESSMDNILERYERQCFVEEELKATHPESEGNWSLEHTKLKARIEILQKNQRHFMGEDLDPLSLKELQNLEHQLDIALKHVRSRKNQLLYASIAELRKKEKALHEQNILLGKKIKQKEEQIAQWSAQQNDAQNSSSFLTQAPQNSQSFLTQALPSLTLRTGYYQTARVVVCEEDGARSNMXMPPWML

SEQ ID NO: 2483 - protein, 219 aa, Chelidonium majus
  misc_feature (12)..(12): Xaa can be any naturally occurring amino acid
GLVKKAHEISVXCDAEVALIVFSTKGKLFEYSTDSGMERILERYERYSYAERELVASELDQGNWSLEYTKLKAKIEILQKNQRHFMGEDLESMSLKELQNLEQQLDTALKQIRSRKNQLMYESISELQKKEKVLQEQNNQLGKKLKEKEKEVAQQQAQWDQQSQGQSSPSFLLSQSLPSLNIGGSYHMRGSNGSEEEGVRPQTTRTNTTLMPPWMVHHL

SEQ ID NO: 2484 - protein, 218 aa, Corylopsis sinensis
GLVKKAHEISVLCDAEVALIVFSTKGKLFEYSTDSCMEKILERYERYSYAERQLVATDPNSQGNLSLEYSRLKAKVELLQRNQRHFLGEDLDSLSLRELQTMEQQLDTALKRIRSRKNQLMYESISELQKKEKAMQEQNNMLAKKIKEKEKTMTQQAQWEEQNQDPGAASFLLQQPLPCLNIGNTYNQGVGGGAPEVRRNELDLTLEPVYPCHIGCFA

SEQ ID NO: 2485 - protein, 229 aa, Corylopsis sinensis
VQLKRMENKINRQVTFSKRRAGLLKKANEISVLCDAEVGLIVFSTKGKLYDMERIFDRYERYSYAERQLVVTNHESQGSWTIEHAKLKARMEVLQRNQRHFMGENLDSVSLKELQNLEHQLDNALKHIRSRKNLLMQESISELQRKDKSLQEENNSLSKKIKEKENALAHRAQWEQQNQGLNSFPILLSQPPQSLNIGTYQTGCSEGEEGTPFQQRPNTLLPHWMVSHL

SEQ ID NO: 2486 - protein, 202 aa, Lolium perenne
MAASLGLNPESLFSSAYAYSSSSPFLANHYAPPAGDGDICAQSFNLHDDHQQHYPRFDDQFENSPPTAPPPITFTGAGEDEHRSSEKTMEERMSAGRIGFRTRSEAVEILDDGFKWRKYGKKAVKNSANPRNYYRCSSEGCGVKKRVQRDQEDPRYVVTTYDGVHNHATPGAAVAEYYCYSPARGSSGSPPAAYSAAGPLYF

SEQ ID NO: 2487 - protein, 443 aa, Arabidopsis thaliana
MATSSSSYGIEQLQKGCYYEWMSVQAKHIVDLKEALMSHRSKEDHKLEELVGKIVNDFQKYTEKRSELSRRSCSSYFAPSWNSPLENGLLWMGGCRPSSFIRVIYSLCGSQAETQLSQYLLKIDENVEVNHGGSMSDLNASQLAKINDLHIKVIEKEDKITKKSANLQENVADMPIAIAAYATDLMNGDVVVEDALDKYEEGMAVLMVEADKLRFETLRKIVDVVTPVQAAEFLLAGKRLHISLHEWGRVREEQRFGCVRTDAAAATGGAGTEKSKRSSLLMLKLHSFYTKIIKTCMVNFGNYFERLPVKLPNNRHVEKEKKKEVKEEEVENWGLRELIDGGDAAPGRILHRNNINIGSSREKKTKHEPYEYDGLEKPTNGNLKGAMVDTKWLKNYYTKNFLAIITLRISVHDEAICVLTIRVTTIVKISKFSKWCQRPLASL

SEQ ID NO: 2488 - protein, 366 aa, Glycine max
MLYQTPYPQPFQFHHPLPSSFSPLLAVPTTPPPLYLPFPQAEKEMECVEAALKSNYRKEMTLKLSPQTFTEEVSVQNGTTCDDFFVNDLLDFSHVEEEPEQQEDTPCVSLQHENPSHEPCTFKDDYASVPTSELSVLADDLADLEWLSHFVEDSFSEFSAAFPTVTENPTACLKEAEPEPEIPVFSFKTPVQTKARSKRTRNGLRVWPFGSPSFTDSSSSSTTSSSSSSSPSSPLLIYTQSLDHLCSEPNTKKMKKKPSSDTLAPRRCSHCGVQKTPQWRTGPLGPKTLCNACGVRFKSGRLLPEYRPACSPTFSSELHSNHHRKVLEMRQKKETVSVDETGFAPAHVVPSLFKHNKVGTGGGKGV

SEQ ID NO: 2489 - protein, 225 aa, Arabidopsis thaliana
MPLGAATVVEEEEEEEEAVPSMSVSPPDSVTSSFQLDFGIKSYGYERRSNKRDIDDEVERSASRASNEDNDDENGSTRKKLRLSKDQSAFLEDSFKEHSTLNPKQKIALAKQLNLRPRQVEVWFQNRRARTKLKQTEVDCEYLKRCCESLTEENRRLQKEVKELRTLKTSTPFYMQLPATTLTMCPSCERVATSAAQPSTSAAHNLCLSTSSLIPVKPRPAKQVS

SEQ ID NO: 2490 - protein, 236 aa, Triticum aestivum
  misc_feature (207)..(207): Xaa can be any naturally occurring amino acid
MDLLIKLLWTWMQAPPVAGNHHGLSVFPGARTSPIDVEALDDEVQALSPSQVPPPGLNRRTRGQPVTPFALDEDAVLEENWRIIRQCATPFYLDEDAAMEENRRTRSQFLTPLYLDEDAALEDNAAMPSHNMWNKRQRVAPLICLSPEREEGSSLQSNNAVQISQEPAKVVVPKEPNFTCPVCLNKLVEPSTTKCGHIFCAECIQAXIQFQKKCPTCRKALRKNNFHRIYLPNSDG

SEQ ID NO: 2491 - protein, 309 aa, Medicago truncatula
MGAPKQKWTAEEEAALKAGVVKHGAGKWRTILMDPEFSSILRTRSNVDLKDKWRNINVTAIWGSRQKAKLALKNSPPAPKTDNNQLALGKVVQREDFLDIKPLTISGGTFQSPKPLTICSGTLQSPNSKEQVSRLGDNNVLEAIVNMKEPKGSDKAAIASYIEEKYQCPPNLRKLLSAKLQQMVTSGKIVQEKHKYKIMPSSAVSEKRGSSSLMLVEARSKDSPEVEKMCDVNILSKSQIEAELSKVRGMSAQEAAAAAAKAVAEAEVAIAQAEAAAREAEIAEAEAEAAQVFAKAAMKALKCKMLHIW

SEQ ID NO: 2492 - protein, 343 aa, Oryza sativa (indica cultivar-group)
MKRGCEDELGAGDVILRGVEEVEEEDDDDLVLPGFRFHPTDEELVTFYLRRKIAEKRLSIEIIKEMDIYKHDPSDFLKTSTVGSEKEWYFFCLRGRKYRNSIRPNRVTGSGFWKATGIDRPICSAAGGGGGDCIGLKKSLVYYRGSAGKGTKTDWMMHEFRLPPPPADDLAAGRSSPPPSLQEAEVWTICRIFQRNITHKKQPQPQLAVAAAAVPAPVPDATSSITGSLESDSAGDDVVEYMNTLQPPPASNVNGGYSNQHYFQEQWNSSSNDNTTVFHQHAAAAPPPEPSPATAMAGFGHDQSVLSSPAPSDFYYKDGCNDDIYRMVMELADPSLFYDHIYA

SEQ ID NO: 2493 - protein, 327 aa, Glycine max
MAVEFMMGYRNDTFAEDNAVREAASGLESVEKLIKLLSHTQQQYQTTSNSTSNSKSSMENIDTDYTAVADVAVSKFKKVISLLGRTRTGHARFRRAPVPVPVPVASPPPSEPRVYRATPLQQIPPPTLHTHSVTDHSLIPKIERKDSSKTINFSYSNSFVSSLTAGDTDTKQPCSSSPSPATAFQITNLSQVSSAGKPPLSSSSLKRKCSSENLGSAKCGSSSSRCHCSKKSRKMRQKRVVRVPAISLKMADIPPDDYSWRKYGQKPIKGSPHPRGYYKCSSVRGCPARKHVERALDDPSMLVVTYEGEHNHTLSAAEATNLILESS

SEQ ID NO: 2494 - protein, 236 aa, Heuchera americana
VQLRRMENKINRQVTFSKRRGGLVKKAHEISVLCDVEVALIVFSNKGKLFEYSTDSCMEKILERYERYSYAERRLVATGSESQENWSLEYTKLKAKIELLQRSQRQFMGEDLDLLSLRELQNLEQQLDTALKHIRSRKNQLMNQSISDLQKKEKAIQEQNNLLAKKIKEKEKAMSQQAEWEQQNNGASTSNFLNPQPLPCLNISSTYQGGAQPEAMRRNELDLTLEPIYSCHLGCF

SEQ ID NO: 2495 - protein, 197 aa, Zea mays
MSTASGTRRAPRRQSQDGSADKVVVIIEATSPVVGSRRGPPTPVPGAQNSPIDVEAIEDEVQAVSPSRVPPPRRDRRTRREPITVVDLEVDASQEGNKRQRVVAVDHLSPDWGAGSSLQPNGVQTGKEPAKEVPKEPSFTCPICWNKMEEPSTTTCGHIFCDTCIKQAIKVQKKCPTCRKGLKMNSVHRIFLPNASS

SEQ ID NO: 2496 - protein, 242 aa, Malus x domestica
MEFPNQAPESSSQKKLGRGKIEIKRIENTTNRQVTFCKRRNGLLKKAYELSVLCDAEVALIVFSNRGRLYEYANNSVRATIDRYKKAYADPTNSGSVSEANTQFYQQEASKLRRQIREIQNSNRHILGEALSSLNAKELKNLEGRLEKGISRIRSKKNEMLFSEIEFMQKRETELQHHNNFLRAKIAENEREEQQHTHMMPGTSYDQSMPSHSYDRNFLPAVILESNNNHYPHQVQTALQLV

SEQ ID NO: 2497 - protein, 210 aa, Heuchera americana
  misc_feature (194)..(194): Xaa can be any naturally occurring amino acid
SVLCDAEVALIVFSNRGKLYEFCSTSNMLKTLERYQKCSYGAVEVNRPCKELESSYREYLKLKGKFEGLQRTQRNLLGEDLGPLNTKELEQLERQLDSSLKLIRSTRTQFMLDQLSDLQNKEQVLMDSNRSLARKLDEISAKNNNLRLSWEGGEQSIPYSQQQAQPQGLFQPLDCNPTLQIGYNSIGSDPDDYXQLMHRMSTGFMPSWML

SEQ ID NO: 2498 - protein, 235 aa, Medicago sativa subsp. x varia
MAMEALNSPTTATPFTPFEEPNLSYLETPWTKGKRSKRSRMDQSSCTEEEYLALCLIMLARSGNNNDKKSDSVATPLTTVKLSHKCSVCNKAFSSYQALGGHKASHRKAVMSATTAEDQITTTSSAVTTSSASNGKNKTHECSICHKSFPTGQALGGHKRCHYEGSVGAGAGAGSNAVTASEGVGLSHSHHRDFDLNLPAFPDFSKKFFVDDEVFSPLPAAKKPCLFKLEIPSHY

SEQ ID NO: 2499 - protein, 274 aa, Solanum chilense
MNSTSMSSLGVRKGSWTDEEDFLLRKCIDKYGEGKWHLVPIRAGLNRCRKSCRLRWLNYLRPHIKRGDFEQDEVDLILRLHKLLGNRWSLIAGRLPGRTANDVKNYWNTNLLRKLNTTKIVPREKTNNKCGEISTKIEIIKPQPRKYFSSTMKNITNNIVILDEEEHCKEIKSEKQTPDASMDNVDQWWINLLENCNDDIEEDEEVVINYEKTLTSLLHEEKSPPLNIGEGNSMQQGQISHENWGEFSLNLQPMQQGVQNDDFSAEIDLWNLLD

SEQ ID NO: 2500 - protein, 218 aa, Oryza sativa (japonica cultivar-group)
MVKEPAAVSRFRFPPLLLSFSFLTLPRPGFDSGWIPLDFRGVRGFKVSRKGDGNGGPGKFGPKKRFNELSAILEPGKPPRADKVSILSDAARLLSQLRAEAQKLKSSNESLQDSIKSLKAEKSELRDEKTRLKAERERLEQMLKGVGAATPAAPAPFVPHHAAAVAAAPAYHPAAFAQAGGKYVPYATSYAPPAAFWQWIPPTSLDTSKDPVMWPPVA

SEQ ID NO: 2501 - protein, 189 aa, Brassica napus
MALEALNSPRIASPVPTLFEEHWTKGKRSKRSRSDHPHRLTEEEYLAFCLMLLARDGDRHHVEEEKTVYKCGVCDKVFLSYQALGGHKASHRNFSSGVDLNVTTPAAVKSHVCSICHKSFTTGQALGGHKRCHYDGSSNVVSNSEGVGSTSHVSGNSRRGFDLNITPINELSPDDEVKSPLPSKKLRLT

SEQ ID NO: 2502 - protein, 304 aa, Glycine max
MGSKPVVDFENVSGSRMTDRPFFQALEKEENCDEDYEGCFHQPGKKRRLTSEQVQFLERNFEVENKLEPERKVQLAKELGLQPRQVAIWFQNRRARFKTKQLEKDYGVLKASYDRLKSDYESLVQENDKLKAEVNSLESKLILRDKEKEENSDDKSSPDDAVNSSSPHNNKEPMDLLIISKNATTTTTSENGTKVLSPLPLPIMVTCCKQEDANSAKSDVLDSDSPHCTSFVEPADSSHAFEPEDHSEDFSQDEEDNLSENLLMTFPSSCCLPKVEEHCYDGPPENSCNFGFQVEDQTFCFWPY

SEQ ID NO: 2503 - protein, 150 aa, Brassica napus
MEPNAFSAFDPRMLTLETPQNPPNPVQFQHPHPYSTAGDQHPHHQQPLKSLYPRSSKAMQLSPLSVGDEEDRGSGSGSGCHPEDSVGTDGKRRVSQWHRMKWTDTMVRLLIMAVYYIGDEGGVGDQTEAKKKISGGGGGGGGGVLQKKGK

SEQ ID NO: 2504 - protein, 214 aa, Zea mays
MNMPLGFNEAFYQLLILHRVEDALGEGLAGRSPSHIAGGANKKASNVGHIKDGSNVSKVEDGHVDRSVGVKKPRYSADEGPSLTELSGYNAKRHEFDPEYDNDAEQALAEMEFKETDSETDRELKLRVLRIYLSRLDERKRRKEFILERNLLFPNPLEKDLTNEDREVYHRYKVFMRFLSKEEHEALVRSVIEERKIRRRIQELQECRSAGCRT

SEQ ID NO: 2505 - protein, 229 aa, Daucus carota
MDHSEESQQQQEEVIDIAYGMPQYHAGPGVATGTPVVPVSAATQAQHFFQQKLQLQQQDQLQAFWANQMQEIEQTTDFKNHSLPLARIKKIMKADEDVRMISSEAPVVFAKACEMFIMDLTMRSWSHTEENKRRTLQKNDIAAAVSRTDVFDFLVDIIPKDEMKEDTRASIPLMGQPPADSVPYYYVPQQHAAGQAGFYPDQHQQQPLPYMQWQQPQQDQNQQQQENGN

SEQ ID NO: 2506 - protein, 307 aa, Cucumis sativus
MIAESMLLNPTSHISTWDSLDDPSPAISSYFSTAHVSPLDSPTAALMDFDSSLWEDPDLPAPVDAYSCDQFRMYEFKVRSCARGRSHDWTKCPYAHTGEKARRRDPRKFNYSGAECPDLRHGCCKKGDACEYAHGTFEIWLHPDRYRTQPCRDGTGCRRRVCFFAHTSEQLRIPGKQSVRSPRAREMAIPAVSSPTSILLSPSSDSPPLSPISPVISGGESLSRLVALMHSLRLDELKTNPGVSSFSPNLRRSSGAAFDLWDRGNEEEPAMERVESGRNLRAQMYAKLMRENSVDRVRPMISAGSLN

SEQ ID NO: 2507 - protein, 249 aa, Daucus carota
MDESEEPQQQQEAVIDSASQMTYGVPHYHAVGLGVATGTPVVPVSAPTQHPTGTTSQQQPEYYEAQHVYQQQQLQLRTQLQAFWANQIQEIGQTPDFKNHSLPLARIKKIMKADEDVRMISSEAPVIFAKACEMFILELTMRSWLLTEENKRRTLQKNDIAAAISRTDIFDFLVDIIPRDELKEEGLGITKATIPLLGSPADSAPYYYVPQQHAVEQAGFYPDQQAHPQLPYMSWQQPHEHKDQEENGD

SEQ ID NO: 2508 - protein, 210 aa, Solanum lycopersicum
AHEMSVLCDAEVALIIFSNRGKLYEFCSSSSMLKTLERYQKCNYGAPEPNISTREALEISSQQEYLKLKGRYEALQRSQRNLLGEDLGPLNSKELESLERQLDMSLKQIRSTRTQLMLDQLTDYQRKEHALNEANRTLKQRLMEGSQLNLQWQPNAQDVGYGRQTTQTQGDGFFHPLDCEPTLQIGYQNDPITVGGAGPSVNNYMAGWLP

SEQ ID NO: 2509 - protein, 295 aa, Cucumis sativus
METLYPSSHLSSSAWFVLDNPSTKWTKEENKMFESALAIYDKETPDRWFKVAALIPGKTVSDVIKQYKELEEDVCEIEAGRFPVPGYDLASSFSFEFVDDRNFDVYRRKSSVGRGSEHERKKGVPWTEEEHKQFLRGLLKYGKGDWRNISRNFVNSKTPTQVASHAQKYFMRQLSGGKDKRRPSIHDITTVNLTEPTASENEKLSSMDQFSKLPSLQKSPCYQKLLFDWNRSSNGGLLGLGSNYGDRLMSFPSGIAANGIKNEQDQELNSAYYGTYSKPHKSIFQFEPSRYQIYG

SEQ ID NO: 2510 - protein, 304 aa, Triticum aestivum
  misc_feature (211)..(211): Xaa can be any naturally occurring amino acid
MAAEEASSSGGGEEGSGAGAGGWTREQEKAFENALATVDEEEGEAMWDKIADAVEGKTPEEVRRHYELLVEDVDGIEAGRVPLLVYAGDGDEGGSGGGAGGSGGGGGGGGKKSGGGGGGHGEKGSSKSAEQERRKGIAWTEDEHRLFLLGLEKYGKGDWRSISRNFVISRTPTQVASHAQKYFIRLNSMNRERRRSSIHDINQRERRGISXAQGPITGTNGQAAVPGKSPKQSPHQPGNLPPGVDAFGTTIGQPVGGPLVSAVGTPVTLPVAAPPHMGYAMHAPVPGTVVPRAPMYPMPPPPSR

SEQ ID NO: 2511 - protein, 305 aa, Triticum aestivum
MMKQESWMEVLPVPPAPYFAGQAGGWFLQQDQRGTGGGGGAWSPQENKLFEEALARVDGDAPDRWERVAALLPGKTVADVMRQYDDLENDVCFIEAGLVPFPHYNANAGAPASGFTLDWDGGGDLAFKRSCYMAAGGNGKRGRGADQERKKGVPWTEEEHKLFLMGLKKYGRGDWRNISRNYVTSRTPTQVASHAQKYFIRLNSGGKDKRRSSIHDITTVNIPDDDHASNTNPSPSPPSALTATSSAPEQFGALVDSKPPPPLGGNHRFMPAHLYGSVKLEASNNGYHGDSVLMQMQCGQLQPLG

SEQ ID NO: 2512 - protein, 224 aa, Oryza sativa (indica cultivar-group)
MAEQEVIRRDDVVAATAAEDERFACSPGSPVSSGSGKRGSGSGSGDEVDDAGCDVGGGGARKKLRLSKDQAAVLEECFKTHHTLTPKQKVALAKSLNLRPRQVEVWFQNRRARTKLKQTEVDCEHLKRWCDQLADDNRRLHKELAELRALKATPTPPAAAPPLTTLTMCLSCKRVANAGVPSPAAAIFPGHPQFLCGFRDHAGAASSSYGGASSGLAKAVRAAR

SEQ ID NO: 2513 - protein, 382 aa, Oryza sativa
MRGGGGGDAGTSSRGGGSGGAPARPRRFPEAAQPEIMRAAEKDDGYAAHVTEACRDAFRHLFGTRVAVAYQNEIKLLGQSLYYLLTTGSGQQTLGEEYCDISQVATSHGLPPTPARRILFILYQTTVPYLAERISSRIVARGIALEDSQLDDHSESDSSSIGTAAQPSPIRNSPSRSLSFSHLSRLRGRVHTLWEWVLRKWPSMLPFAQDFIQLTIRTNLMFFYFEGLYYHLPKRAAGIRYVFIGKPLNQRPRYQILGIFLLIQLCILGAERLRRSRGVPVLNEDGNIISDIRHGKTADLATSSELLRLSVSSTSCYATEFYLKKKATKHPVVRANAPFVSVPVRIPLPQPVAMSSAGVALWSGVMRSLNAPYAELRLHIRV

SEQ ID NO: 2514 - protein, 307 aa, Oryza sativa (indica cultivar-group)
MDLGLSLGLGLASQGSLTSSTTTTSSPGAGSSSPWAAALNSIVGDVRRDQAAAHAAAAVGVGVGGEEMYQGRASTSPDSAAALSSASGKRERELERSGSGVDDDDGADGAGGRKKLRLSKDQAAVLEECFKTHSTLNPKQKVALANRLGLRPRQVEVWFQNRRARTKLKQTEVDCEYLKRWCERLADENKRLEKELADLRALKAAPSPASASAMQPSSSAAATLTMCPSCRRVATAGAPHQPNHQQCHPKSNTTISSSSTAAAAVAVAGGNVLPSHCQFFPAAAAAADRTSQSTWNAAAPLVTRELF

SEQ ID NO: 2515 - protein, 214 aa, Michelia figo
  misc_feature (210)..(210): Xaa can be any naturally occurring amino acid
RPCAEMSMLCDAEVALIVFSSRGKLYEFGSAGVNKTLERYQRCCYTFQDANITDRDTQGWYQEVSKLKAKCDSLQRSQRHLLGEDLGPLSVKELQKLERQLESALTQTRQRKTQIMLEHMEALREKERQLGDINKELKNKLEAKGQGAFRAMQASWESGPLVGNNGFPMHPSQSAAIECEPTLQIGYHSFAAPEASIPRTVVAESNFMPXGMLC

SEQ ID NO: 2516 - protein, 259 aa, Glycine max
MDRIKGPWSPEEDEALRRLVQTYGPRNWSVISKSIPGRSGKSCRLRWCNQLSPEVERRPFTAEEDEAILKAHARFGNKWATIARFLNGRTDNAIKNHWNSTLKRKCSEPLSEPRPLKRSATVSGSQSGSDLSDSGLPIILARSVSVTVAPSNHLAETASSSVTDPATLLSLSLPGFDSCDGANNGPGPNQGPSCGPFQEIPMLGSQKQLFSQEFMKVMQEMIRVEVRNYMSVLERNGVCMQTDAIRNSVLERMGIGRVE

SEQ ID NO: 2517 - protein, 547 aa, Oryza sativa (japonica cultivar-group)
MSYHEEERHGGNGLDWFEESMSSLLAADVDLAGGGGDAGGGGYAWWWAASPAAQQDDIGSVVAQTLSPPSTAAPAAASPSIASPAASSPSDVPSSSSKKRKSPAHRAPGHTGGKKGGGGKGGGGGSDRDMRWAEQLLNPCAVAVEAGNLSRVQHLFYVLGELESFSGDANHRLAAHGLRALARWLPAAVGPAAAAAVRVPPCSERPTTAFAAAEPRLFRASLIRFHEVSPWFALPNALANAAIAQASTCGAAGATPRPLHVVDLGVSHGVQWPTLLESLTRQPGGRAPPSVRLTVVGPGATATSPVAPFSASPPGYDFSPHLLRYAKSINLDLRISRAATLDDAVPGDDGEALVVCLQFRLGHAAAEERREVLRKARGLNPELVVLSELDSGVGVVGGDGGSAAGEFAARLELLWRFLESTSAAFKGKDVEERRLLEAEAGAILAAADVAAAGEGREGWRERMAAAGSRRRRSARRRWSPPGRCSASTTAGGRCQRRRRRPPRWRCGGRGSRCPSARCGGRRRSGRTGDVAMGERRDRVDLIRAVRY

SEQ ID NO: 2518 - protein, 334 aa, Triticum aestivum
  misc_feature (246)..(246): Xaa can be any naturally occurring amino acid
  misc_feature (292)..(292): Xaa can be any naturally occurring amino acid
MSGGQELNLPPGFRFHPTDEELVTHYLCRRCAGAPIAVPIITEIDLYKFDPWQLPKMALYGEKEWYFFSPRDRKYPNGSRPNRAAGSGYWKATGADKPVGTPKPLAIKKALVFYAGKAPKGEKTNWIMHEYRLADVDRSARKKNSLRLDDWVLCRIYNKKGGLEKPASVDRKPAAMGGYGGPPGAMVSSPQEQKPVMGMNANGGGGVQPFPDFAAYYDRPSDSMPRLHADSSCSEQVLSPDFPAGXADQPKISEWERSFACRGDPVNPAAGSMLEPNGGFGGDPLLRDILMXYWGKPVLSRKQPNDPVKDIPSILALRWRPGGVEEGNTALIVA

SEQ ID NO: 2519 - protein, 130 aa, Glycine max
MTGGHDRVKGSWSPQEDATLLKLVNEHGARNWSVISAGISGRSGKSCRLRWCNQLSPEVQHRPFTPAEDKMIIKAHAIHGNKWATISRLLPGRTDNAIKNHWNSTLRRRRAVESSSSYSLSAGETSLFLV

SEQ ID NO: 2520 - protein, 189 aa, Gossypium hirsutum
MSFIGTQQKCKACEKTVYPVELLSADGVPYHKSCSKCSHCKGTLKLANYSSMEGVLYCKPHFEQLFKETGNFNKDFQLSAKAAEKLTPEMTRSPSKAASMFSGTVEKCATCGKTAYPLEKVTVEGQSYLKSCFKCSHGGCSLSPSNYAALEGILYCKHHFSQLFKEKGSYNHLIKSASIKRAAASVPEA

SEQ ID NO: 2521 - protein, 318 aa, Zea mays
  misc_feature (91)..(91): Xaa can be any naturally occurring amino acid
  misc_feature (102)..(102): Xaa can be any naturally occurring amino acid
  misc_feature (114)..(114): Xaa can be any naturally occurring amino acid
MTRRCSHCSHNGHNSRTCPNRGVKIFGVRLTDGSAIRKSASMGNLSLLSAGSTSGGASPADGPDLADGGGGYASDDFVQGSSSASRERKKXVFLGLKKNTGXVFAGITKAWERXWRGISRNFVVSRTPTQVASHAQKYFIRQSNMSRRKRRSSLFDMVPDESMDLPPLPGSQEPETSVLNQPPLPPPVEEEEEVESMESDTSAVAESSAASALMPESLQPTYPMIVPAYFSPFLQFSVPFWPNQEDGGDLPQETHEIVKPVAVHSKNPINVDELVSMSKLSIGEPGQETVSTSLSLNLLVGQNRQSAFHANPQTRAQA

SEQ ID NO: 2522 - protein, 358 aa, Medicago truncatula
MDPSSSSQFVSSRNIGVYDPIHQFTIWEEHFKSNGDSSVYEPEMKLNNQSEDASFGILGTSIKYDHQEANKVTNKMQRRLAQNREAARKSRLKKKAHIQQLESCRLKLLQVEQELDHTKQGLYIGGGLDSNNLGFAGSVNSEIATFKMEYEHWVEELNRQMLELKGALSAHSSDIRIGELVNGLMNHYFKLFCMKSDAAKVDVFYVITGMWKTTAEGFFLWIGGFRPSELLKVLVPLIEPLTEEQRFDAYNLEKSCRQAEDALSQGMEKLQGMLVDTVAAGQLVEGTYIPQMDIAIERLEALASFVNQADHLRQETLQQMSRILTVRQTARWLLALGEYFQRLRDLSKLWTNRPREPA

SEQ ID NO: 2523 - protein, 858 aa, Cucumis sativus
MAAYALLNDSTPRGVNGGFDDSPLTSASTNSNGSDELNHQQIVQVPQPRLPVGKMVRKRIASEMEIEGLDSGGGGGGGGSRRYYCCSSTVLPRSLASDRPLEKIRRIGIIVLLQTLAMAATTPLLCINLTALTSVVIEGSNLSNPPSGSDATVSSTTSNNNLLDSTLPVLRPQPHHHHLQNPAVCGFSGLPLFPPESNHHHNKLNTRNNPFPLPNPSQVLLHNPPTTATTSIIAAASSPMDDSSATAWIDGIIKDLIHSSTAISIPQLIQNVREIIYPCNPNLANLLEFRLRTLTDPSVPNFATEDHRVRKSPLPLPAPVAGLGLQQRQFNQEQHEQEHDCSGLKLNLDSTSLHNLSNFPSQPPFHEPYLQWGATPPPVPTPSAAAAGEDALQRLPGHHQLNISSVTPSSLVSLNHVPSKPQSEQQNSCTKAAAAAQPAPAPPSTSNNPSATALLIREIKEEMRQQKRDEEGLHLLTLLLQCAEAVSADNLEEANKMLLEISELSTPFGTSAQRVAAYFSEAMSARLVSSCLGIYAALPPSLVPHTHSQKIASAFQIFNGISPFVKFSHFTANQAIQEAFEREERVHIIDLDIMQGLQWPGLFHILASRPGGPPYVRLTGLGTSQEVLEATGKRLTEFAEKLGLPFDFFPVADKIGNLDLERLNVSKREAVAVHWMQHSLYEVTGSDSNTLWLLQRLAPKVVTVVEQDLSHTGSFLGRFVEAIHYYSALFDSLGVSYGEESEERHLVEQQLLSREIRNVLAVGGPSRSGEVKFQNWREKLQQSGFKGISLAGNAATQATLLLGMFPSDGYTLVEDNGTLKLGWKDLCLLTASAWKPPFHHHAAAAAAAAVTNNHIPRY

SEQ ID NO: 2524 - protein, 363 aa, Zea mays
  misc_feature (103)..(103): Xaa can be any naturally occurring amino acid
  misc_feature (122)..(122): Xaa can be any naturally occurring amino acid
  misc_feature (136)..(136): Xaa can be any naturally occurring amino acid
MDCGGALQLPPGFRFHPTDDELVMYYLLRKCGGLPLAAPVIAEVDLYKFDPWQLPAGMAFGGEKEWYFFSPRDRKYPNGSRPNRAAGTGYWKATGADKPVGSXPRPVAIKKALVFYAGKPPXKGVKTNWIMHEYRXLADVDRSAAARKKTNNALRLDDWVLCRIYNKKGVIERYDTVDDDDGDGAVAEDVKPVPAPAASKNPRASARVGAAAAAPMKVELPEYGGGYYDYDDLETPSAGMLCFDRPSAPAPADRDSNNSVPWTTHHTHTDNSSSGSERVLSPSPDLPDRDHAESQPAAAAAAAGWWPVGGDWGSAAEDGFMVDVDVDDGSSLFGPLSPGLFARVDAAAFGFGDMLASYLHKPF

SEQ ID NO: 2525 - protein, 206 aa, Michelia figo
  misc_feature (107)..(107): Xaa can be any naturally occurring amino acid
  misc_feature (204)..(204): Xaa can be any naturally occurring amino acid
VQLKRMENKINRQVTFSKRRNGLLKKAYELSVLCDAEVALIIFSSRGKLYEFGSAGTNKTLERYQRCCYTPQDVVVSDRETQGWYQEVSKLKAKYESLQRSQRHLLXEDLGPLSVKELQHLERQLEVALSQARQRKTQIMIEQMEELRKKERQLGDINKQLKIKLEAEGQGPFRCIQGSWESGAMVGNNTFSMNAPQAAPLDAXSP

SEQ ID NO: 2526 - protein, 208 aa, Michelia figo
  misc_feature (5)..(5): Xaa can be any naturally occurring amino acid
GLVKXAHEISVLCDAEVAVIVFSTKGKLYEYSTDSRMSRILERYERYSYAERELVLSGPESEGSWCLEYGKLKAKVESLQRNLRHFTGEDLDTLSLKELQQLEHQLDAALKHIRSRKNQIMFDSIAELQRKEKSLREQNNMLEKEIQEKEKAMAQQVQWEQQNQSQSSPSFLLPTLNIGTYHRGNEVEEEGARPPARTNSLMPSWMLC

SEQ ID NO: 2527 - protein, 299 aa, Deinococcus radiodurans R1
MPRHFGAVPGVVPGMAFVNRQELRDAGVHLPTQAGISGSASEGADSIVLSGGYEDDRDEGDVILYTGEGGRDPLTGHQVKPQQLVRGNLALAISHRDGLPLRVTRGHRHSSQFSPQSGYQYAGLYRVDDHWREVGRSGFLIWRFRLTRLENQDAHHAGADPQHPDSQHPERRPTLVQRIVRDTATARAVKALYDHRCQVCGERLETPAGAYAEAAHIRPLGAPHHGPDVAGNILCLCPNHHVLFDFGAFSVGDDLRLLGLPGRLHVHPQHAVDREHLAYHRRHYALQAGLEWGCSVPLT

SEQ ID NO: 2528 - protein, 433 aa, Populus trichocarpa
MDSQWDYKNFGNAPPGQSSVTKPQENPFLIRQSSVYSLTFDEFQNTWGGGLRKDFGSMNMEELLKNIWTAEETQAMTNTLGVGSEGSAPGGNLQRQGSLTLPRTLSQKTVDELWRDLIKETSGAAEDGSGSAGSNLPQRQQTLGETTLEEFLVRAGVVREDTQQIGRPDNSGFFGELSLLNNNNDSSLAIGFQQPNGNNGLMGTWRMENNGNLVANQPPSLTLDAGGIRPTQQLPQSRQLSQQQQLLFPKPAATVAFASPLHLSNNAQLASPGVRRSVVGIADRSVNNGLAHSGGMGIVSLATGGVTIATGSSANRVSPDVIAKSNADTSSLSPVPYVFSRGRKASTALEKVAERRQRRMIKNRESAARSRTLKQAHTQKLEDEVAKLKELNEVLQRKQAEIIEMQQNQFFETKKAQWGGKRQCLRRTLTGPW

SEQ ID NO: 2529 - protein, 239 aa, Phytolacca americana
  misc_feature (235)..(236): Xaa can be any naturally occurring amino acid
VQLRRMENKINRQVTFSKRRSGLVKKAHEISVLCDAELALIIFSPRGKLFEYSTDSSMEKILERYERYFYAERQLASNDPNTEVNWTFDFAKLKAKLELLQRNHRHYLGQDLDSLNIKDLQSLEQQLDNALKHIRTRKNQLMHESISELHKKEKAMQEQNNMLVKKIKEREKAMAEAQGMQWQRQQNEPPEASNFLLPPPLTSWNTAGDAYHGQIAGEVKRNDLDLTLEPVYSCXXGCF

SEQ ID NO: 2530 - protein, 133 aa, Glycine max
  misc_feature (45)..(45): Xaa can be any naturally occurring amino acid
IDWLFLVRDDRIFSEMLRRAREADLGTVVVGDWDKALGRHADLWXPWSGVENGEVGDLLPKRRRENSRRREQGEEHGFGLEDDDGGVFLNEDEELGQEFMLLYSEDEDEDVDVEDYYDDDDDDEEEEDGFYIL

SEQ ID NO: 2531 - protein, 205 aa, Phytolacca americana
SVLCDAEVALIVFSTKTKLFEYATHSSMERILERYESYSYAEKQLVATDSESRQQGSWAMEYPRLVSKLEVLQKNMRHYVGEGIESLTLRELQHLEPQLDTALKRIRTRKNQLMHESISQLQKKQKTMQEHNNLLVKLVKEKDKTQATQKENPRELLMLSSNPLPFPSLSIGGAYQEREMGIKQVIHQSEPNTSSAMPHWMLHHL

SEQ ID NO: 2532 - protein, 387 aa, Oryza sativa (japonica cultivar-group)
MSSFAHHHHGSLVEKDGRMSALRSSLRPYEAAEEMAAAAAAGGPAAAWGAVERGAGMMGDGFSVEDLLDLEELCEVDRDGGEQGEAAAAAAAAVEKERSSDSHGSSVVSYEPMPLLPPVMDLPAHDVEELEWVSRIMDDSLAELPLPQLPAAAAALAACGKPQHRRPHEGAASALLDPMRTPTICALSTEALVPVKSRRSKRSRASVWSLSGAPLSDSTSSSSTATTSSCSSSASFSPFLQYVDFPALVASDLLDEQPRSKKSKHGKNGKQKPKKRGRKPKHQQPPHLAAAAGGGAALPATGDRRCSHCGVQKTPQWRAGPEGAKTLCNACGVRYKSGRLLPEYRPACSPTFVSSLHSNSHRKVLEMRRKKETPVIVAAAAPAVASF

SEQ ID NO: 2533 - protein, 228 aa, Triticum aestivum
MFMAQEEPGLALGLSLGSGAGHHHHQLPQPKEAVPLEPYLSLSLAGAGAVKREEEERALIYCSAASSAADDLVEGYNSSGGGSRKKLRLTKDQTALLEDHFKEQSTLSHKQKASLARQLNLRPRQVEVWFQNRRARTKLKQTEVDCKLLKRCCETLTEENRRLHRELQHLRALHHHQHHHHHPAAAFFIPSAATAASVCPSCTGAPPAHAADRPATKRSFFATKSAAC

SEQ ID NO: 2534 - protein, 142 aa, Glycine max
MVAYISSYEFRAWEEVSDCLMGKRIGGDDNHHLGVSAMKMKKMKARRKVREPRFCFKTMSDVDVLDDGYKWRKYGQKVVKNTQHPRSYYRCTQDNCRVKKRVERLAEDPRMVITTYEGRHVHSPSNELEDSQTPFELSNFLW

SEQ ID NO: 2535 - protein, 212 aa, Phytolacca americana
SVLCDAEVALIVFSTKGKLFEYSTESSMEAILERYERYSYAEKQLVATDSESQQQGSWAMEYPRLISKLEVLQRNMRHYVGQDIDSLALRELQHLEQQIDTALKRIRNRKNQVMHESISQFQKKEKAMQEQNNLLVKLVKEKGKTQVIEEENPSQALMLSSSNPLSFPSLSIGGSYQERTEMGVEQVHYQGQGQVVPPNSNTTMPPWMLRHL

SEQ ID NO: 2536 - protein, 216 aa, Brassica napus
MSTNETLTDSQLQMVPAYGSSSDIMSVDGESSRTASYNDLVQNPYLFLDKLRDFLEKIGKTLEFPTVCGESLDLHQLFVEVTKRGGLQMVIKKRKAKEVTEAFNLKKPLTNAAYVIRKNYLRMLFEFEHVYFFRQPFSSFWEREEDVKRLVENSAHDKGIQLGSMIDEWTIDGKFDDGYLVTVKMGGSQELKGVLTTLLLAKLLGDARRKQTVSCG

SEQ ID NO: 2537 - protein, 245 aa, Nicotiana tabacum
MGRGRVQLKRIENKINRQVTFSKRRSGLLKKAHEISVLCDAEVGLIVFSTKGKLFEYSTDSCMERILERYERYSYAERQLTATDHETPGSWTLEHAKLKARFEVLQRNQRHYAGEDLDSLSMKELQNLEHQVDSALKHIRSRKNQLMHESISELQKKDKALQEQNNKLSKQVKEREKELAQQTQWEQQSHDHLNSSTFVLSQPLSSLHLGEAYSTAGDNGEVEGSSRQQQQNTVMPPWMLRHLNN

SEQ ID NO: 2538 - protein, 328 aa, Zea mays
  misc_feature (301)..(301): Xaa can be any naturally occurring amino acid
HSLFCSVSNPPARPFSCLSLLQEASGYFFCLEDRALLCRDCDVAIHTVNSFVSVHQRFLLTGVQVGLDPADPVPPIAEKHVNAAGGSVNQPVRHQPKRSPTVQFSVEGSASVPTKNVTNGDCSRQNFVPTARGEVVDWTMNNSTIRSVESPPKYISEESPTLLQSSQTTTVFSNQINGNSDGAYHLSFSGGNVTDSLPDWPVDEFFSNSEYGPNFGFSENGSSKGDNAKLGGAGGSPQCRLAEGSVAEELLGQVPGLITDEYMSRVPENSWTVPEVPSPPTASGLNWHGNLCFPAYDSTMXVPEITSLQNSESHFTVPSSFKRRRREY

SEQ ID NO: 2539 - protein, 334 aa, Glycine max
MAVDLMTTGCSRNDNINSFTTKAEENAVQEAASGLESIEKLIRLLSQTQTQTRHQINNNSSNEIAIAMDCKVVADVAVSKFKKVISLLGRTRTGHARFRRAPLPNQNQHTQPPSEPPVFHATPLHQIPPPSLHQIPKTERNLNDSSSSKTIHFSYPSAATSFISSLTGDGAADNKQPSSSPPAAAATTTPFQITSLSHVSSAGKPPLSTSSFKRKCSSENLGSGKCGSSSSRCHCSKKSRKMRLKRVVRVPAISLKMADIPPDDYSWRKYGQKPIKGSPHPRGYYKCSSVRGCPARKHVERALDDPAMLVVTYEGEHNHTLSAADATNLILESS

SEQ ID NO: 2540 - protein, 642 aa, Oryza sativa (indica cultivar-group)
MAHMPWCASATLSSSSLSLSLLFSTFSLLAKCSNVLMPLAGNIERFMDSFLVLLVSVGPDINSIRSGFGRGDSIAAVVNEQTKCVVLPNLNFETHHSASDLPNDTGSTEVKTFEPCDAQYTDYTPCEEQKRAMTFPRDNMIYRERHCPPEKDKLYCLVPAPKGYAAPFHWPKSRDYVHYANIPHKSLTVEKAIQNWVHYEGKVFRFPGGGTQFPQGADKYIDHLASVIPIANGKVRTALDTGCGVASLGAYLLKKNVLTMSFAPRDNHEAQVQFALERGVPAYIGVLGSMKLSFPSRVFDMAHCSRCLIPWSGNDGMYMMEVDRVLRPGGYWVLSGPPIGWKIHYKGWQRTKDDLQSEQRRIEQFAELLCWNKISEKDGIAIWRKRINDKSCPMKQENPKVDKCELAYDNDVWYKKMEVCVTPLPEVKTMTEVAGGQLEPFPQRLNAVPPRITHGFVPGFSVQSYQDDNKLWQKHINAYKKINNLLDTGRYRNIMDMNAGLGSFAAALESTKLWVMNVVPTIADTSTLGVIYERGLIGMYHDWCEGFSTYPRTYDLIHANAVFSLYENKCKFEDILLEMDRILRPEGAVIIRDKVDVLVKVEKIANAMRWQTRLTDHEGGPHVPEKILFAVKQYWVVESKSS

SEQ ID NO: 2541 - protein, 315 aa, Zea mays
MAMVAAAEGSGRRDAEAELNLPPGFRFHPTDEELVVYYLCRKVARQQVPVPIIAEVDLYKFDPWDLPEKALFGRKEWYFFTPRDRKYPNGSRPNRTAGKGYWKATGADKSIVPMGSTRAAGIKKALVFYSGKAPRGVKTDWIMHEYRVAQADHTLGKKGSQKLDEWVLCRLYNKRNNWDKVKVEEQELEAAPRRQHHLQSAEDSMSNSFQTHDSDIDNVFELQNCYGNNMVQGQAMTPRNDIGVVTVKEDNDWFTDMNLDDLQASYNMAHTVNPNPAQTANLVAGQGHGYLQGYGYLQYMNSPSMKMWQTILPPF

SEQ ID NO: 2542 - protein, 158 aa, Brassica napus
MDQLLHHQDVYGNYNKAREAMRVPCSNPTQLDHDQKKPSPATGAARPQPPELALRCPRCDSTNTKFCYYNNYSLSQPRYFCKSCKRYWTKGGTLRNIPVGGGCRKNKRSTSSATRSLRTTPEPASHDGKAFSAASFGGFGNNEHIDLSLAFALLNKQP

SEQ ID NO: 2543 - protein, 318 aa, Pimpinella brachycarpa
MMVQQRDELGLSLSLSFPGSSHEQNKSNTTNNKHNQMPHASTPLELNLMPSQPLNLLHNNTTTWTHPASHDRKMEACRVDRRSLLTGIDVNRIPAMTVDMEEETGVSSPNSTISSLSGNKRSLVNERSELANGDEILESSRSDDEDGDNSRKKLRLTKDQSAILEESFKEHNTLNPKQKIALAKRLGLRPRQVEVWFQNRRARTKLKQTEVDCEFLKRCCQTLTEENRKLQKEVQELRALKSSPQFYMQMTPPTTLTMCPSCERVGGLQSATTTLSAGPSITQAEPLRSHPMSSNHHRLPFNPWASPQRPLDALHPRS

SEQ ID NO: 2544 - protein, 88 aa, Solanum lycopersicum
MSSMSSQHGSSGSWTAKQNKAFEKALAVYDKETRDRWSNVAKAVGGKTAEEVKRHYEILLRDVFFIDNGMVPFPKYKTTGGSHNSTSD

SEQ ID NO: 2545 - protein, 685 aa, Arabidopsis thaliana
MDQQDHGQSGAMNYGTNPYQTNPMSTTAATVAGGAAQPGQLAFHQIHQQQQQQQLAQQLQAFWENQFKEIEKTTDFKNHSLPLARIKKIMKADEDVRMISAEAPVVFARACEMFILELTLRSWNHTEENKRRTLQKNDIAAAVTRTDIFDFLVDIVPREDLRDEVLGSIPRGTVPEAAAAGYPYGYLPAGTAPIGNPGMVMGNPGEESKVFMSIDPFLNEKFRDEPERRMYKLRVNNVIAFIYKKRYLVVIYLLRKGAASMATNNDFGAFIEKVTISPTSTSSSPPSLQGLTFAIKDIFDVEGRVTGFGNPDWLRTHSAATSTAPVVSSLLEAGATALGITIMDEMAYSINGENAHYGTPRNPIAFDRVPGGSSSGSAVAVAARLVDFSIGTDTGGSVRVPASYCGIFGFRPSHGAVSTVGLTPMAQSFDTVGWFARDTATLKRVGCVLLQQHHLNPIEPSQLIIADDCFKLCSVPHDLLVQPLVGSVEKSFGGNTVVKKVNLGEYIGQNVPSLKHFMTSDDVTTQQEFCIPSLMALSSSMRLLQRHEFKINHGAWISSVKPEFGPGISERIEEAIRTSDEKIDHCRSVKSELITALSTLLGEKGVLVIPTVPGPPPHLQANVAALESFRSRAFSLLSIAGVSGFCQVSIPLGLHENLPVSVSLVAKYGSDGFLLSLVDSLAAFI

SEQ ID NO: 2546 - protein, 268 aa, Glycine max
SCLQFQWRRQEIEACTSGCPFGEGCHFLHYVPGGFKAVSQLINVGSNPVTPQVGRNPVPPSFPDGSSPPVVKTRLCNKFNTAEGCKFGDKCHFAHGEWELGRPTAPSYEDPRVMGQMPSSRVGGRVEPPHPAHGAAASFGASATAKISINASLAGAVIGKNGVNSKQICRVTGAKLSIRDHDTDPNLRNIELEGSFDQIKQASAMVHEVILNVSSASGPPMKSFTSQNSAPASNFKTKLCENFAKGSCTFGERCHFAHGNDELRKSGM

SEQ ID NO: 2547 - protein, 181 aa, Brassica napus
MKERQRWSGEEDALLRAYVRQFGPREWHLVSDRMNKPLNRDAKSCLERWKNYLKPGIKKGSLTEEEQRLVIRLQEKHGNKWKKIAAEVPGRTAKRLGKWWEVFKEKQQREEKESNKRVEPIDESKYDRILESFAEKLVKERSVSVPMASSNGPPSNHVIPPWVATPNNGNSVAVRPPSVTL

SEQ ID NO: 2548 - protein, 331 aa, Zea mays
MGSQTMTSQAGGSGGDVGGSAGAGAGAGQHGQMQSLARQGSLYNLTLDEVQSHLGEPLHSMDLEELLKSVFPDGLDPDGGTTSQYEQSSGLLRQGSITMPLELSKRTVDEVWKGIQDVPKRNVGEGDQQSQERERQPTLEKMTLEDFLVKAGVVARGYLKDLNDVGSVEQVGSAGAAGLTAGGQWLDHYQQRITAIEPHQHRQHSLPGAYIPGQLSLQSLNVGPSAILESYSDGHISSPMMGALSDSPMPGRKRGSPGDVADKLVERRQKRMIKNRESAARSRARKQAYTNELENKVSRLEEENKKLTTLKELENILFFEPLPECVGPSTN

SEQ ID NO: 2549 - protein, 410 aa, Oryza sativa (japonica cultivar-group)
MPPPLSFLHLAANPTPLHASPLRRARLRHRLSLRTDHPSRRAVASASASAGENPSTPGGPIADVEMVRGKDGVWTARPPTVVVLWDLDNKPPRGPPFPAATALRDAASLLGRVVSVSAFANRHAFSHVPAWVADERRERRAMDRAERAGAASPPVPYSCAVCGRRFPTRPDLTRHFRQLHQRERNKKLSRLRSLKGKKRQKFRERFISGNTKYDDAARELLTPKVGYGLAAELRRAGVHVRTVSDKPQAADHALKRQVKHSVACGVDWLVLVSDDSDFTDTVRKARAADLRTVVVGDGCRALGSVADIWLPWDRVENGEVDEDMLRNGTHMGFRDEEEDEQDDDEFIVDWDTSDLDGVVDDIVATRTKLFGATTMSAFADEEIMDGILGVGINGGDMLWSSDDEDEDGYF

SEQ ID NO: 2550 - protein, 226 aa, Phytolacca americana
GLVKKAHEISILCDADVALIVFSTKGKLFQYATGSCMEKILERYERYSYAERQLITPDPESHLSWTLEHAKLKARVEILQKNQRNYMGEELDTLSLKELQTLEHQLDSALKQIRSKKNQLMYESISQLQKKDKALQEQNKSLSKEVKEKEKEKEKTMTQQAQWDNQNQDINSSSCLMSDQALPSLNIGMNYQTESGSSSVENEAIQQQNRNNTTIALMPHWMLSHL

SEQ ID NO: 2551 - protein, 215 aa, Pachysandra terminalis
GLVKKAHEISVLCDAEVALIVFSTKGKLFEYSTDSCMDQILERYERYCCAERELGAADTESQGSWTQEYTKLKSKIEVLQKNLRHLKGEDLESLRLKELQNLEQQLDNSLKHVRSRKNQLMHDSISELQKKEKELQEQNNMLNKKLKEKERAKTQQAQWEQQNQGPNSPSLQLSQPLPFLNIGGTYQTRSTRNQEEGGRPHHSNRTDALMPHWMV

SEQ ID NO: 2552 - protein, 99 aa, Triticum aestivum
  misc_feature (20)..(20): Xaa can be any naturally occurring amino acid
  misc_feature (42)..(42): Xaa can be any naturally occurring amino acid
MASLSMSAAGRAGWTPKQNXLFEQALAVHDRDTPDRWHNVAXHAVGGGKSADDVRRYYELLVRDVANIEAGKVPFPAYRPPCPGPNVGYEADRLKHLKI

SEQ ID NO: 2553 - protein, 234 aa, Pachysandra terminalis
  misc_feature (204)..(204): Xaa can be any naturally occurring amino acid
  misc_feature (207)..(207): Xaa can be any naturally occurring amino acid
  misc_feature (211)..(211): Xaa can be any naturally occurring amino acid
VQLRRMENKINRQVTFSKRRTGLLKKAHEISVLCDAEVALIVFSTKGKLSQYSSNSSMETILDRYERYSYAERKLMAGDHLDSQGSWPLEYTKLKSKIEVLQRNQRHFMGEELDSLSLKELQYMEHQLDTSLKHIRSRKNQLMNDSIYDLQKKEKALQEQNSTLIKKLKEKEKAPAHQACWEQQGQNLPSFLLSQPLPSLNIGXNYXLARXSRDEEEGAQSHARTNPIMPPWML

SEQ ID NO: 2554 - protein, 151 aa, Daucus carota
MKRLSSSDSLGALMSICPTTEEGSPGNNHVYSREFQSMLEGLDEEGCVEEMGQISEKKRRLSINQVKALEKNFEVENKLEPERKVKLAQELGLQPRQVAVWFQNRRARWKTKQLERDYGVLKANYDSLKLKNDTLQQENQSLLKEIRELNS

SEQ ID NO: 2555 - protein, 238 aa, Pachysandra terminalis
VQLRRMENKINRQVTFAKRRNGLLKKAYELSVLCDAEVALIIFSARGKLYEFCSSSSMQNTLERYQKCSYGPLEPSQPAKETQSSYLEYMRLKARVEGLQRSQRNLFGENLGPLSTKELEQLEHQLEMSLNQIRSTKTQFMLDQLSDLQRKEQMLQEANRSLKRKLEESNAENSLGPSWESGGHGVPFGHQPAQSEGFFQPLECNSTLQIGYNHVGADQMSITVPPQNVNGFVPGWMV

SEQ ID NO: 2556 - protein, 197 aa, Thellungiella halophila
MGRKKLEIKRIENKSSRQVTFSKRRNGLIEKARQLSVLCDASVALLVVSASGKLYSFSSGDNLVKILDRYGKQHADDLKALDLQSKALSYGSHHELLELVESQLVDSSVDNASVDSLAQLEDHLETALSVTRARKTELMLKLVDSLKEKEKLLKRENQVLASQMEKNQHVGAEADNMEMSPGQISDSNLPVTLPLLN

SEQ ID NO: 2557 - protein, 415 aa, Oryza sativa (japonica cultivar-group)
MQQQPPPPASNSSSLAAAAADQPSPAKRKRRPPGTPDPDAEVVALSPRTLLESDRYVCEICGQGFQREQNLQMHRRRHKVPWRLVKRPAAATAAEDGGAAGGGGGAGGGAGGGGARKRVFVCPEPSCLHHDPAHALGDLVGIKKHFRRKHGGRRQWVCARCAKGYAVQSDYKAHLKTCGTRGHSCDCGRVFSRVESFIEHQDACNSGRVRGEVVPVATTLPVIRPAALRHHHHHPPPPPPELQLLPASTTAPLAAAFSSNSTTTGSSSHEQHATTMTTTKLQLSIGPAAVVAAASGGGGACAAAAGGEEEQQREEVRRALEEKTAADAARERAREEAAAAERALEDARRARHRARGELEKALALRDHAARLIAQVTCHACRQRSLAVMSMAAIDGHGASAVAREHLRGGGVGAGI

SEQ ID NO: 2558 - protein, 189 aa, Brassica napus
MAFAGTTQKCMACDKTVYLVDKLTADNRVYHKACFRCHHCKGTLKLSNYNSFEGALYCRPHFDQNFKRTGSLEKSFEGTPKIGKPDRPLEGERPAGTKVSNMFGGTREKCVGCDKTVYPIEKVSVNGTLYHKSCFKCTHGGCTISPSNYIAHEGKLYCKHHHIQLIKEKGNLSQLEGGDNAAKDKVDAA

SEQ ID NO: 2559 - protein, 238 aa, Peperomia caperata
  misc_feature (207)..(207): Xaa can be any naturally occurring amino acid
  misc_feature (238)..(238): Xaa can be any naturally occurring amino acid
VQLKRMENKINRQVTFSKRRTGLLKKAHEISVLCDAEVALIVFSTKGKLYEYATNSSSMPGILDRYERHSFTDKEFFIKEGEPPEGAWTLEYAKLKARYELLQKNYRHYLGEDLGSLSGKELQQLEGQLDASLKNVRSRRTQALFHTISDLQKKEKSLLEQNSVMIKKLQDLEKAEKAQQSQLEMQNHERTQNQPPLILLPPPALSXGSFRQENGPSVEGEAAPRVAQKNSLLPPWMX

SEQ ID NO: 2560 - protein, 306 aa, Zea mays
MDAAARKRSRPESANGGAAGGKRSRESESQQTGLSSKSKPCTKFFSTVGCPFGEGCHFAHFVPGGYQAVSKSHSLGHAAVSAPSRAPADHAASGVKTRMCTKYNTAEGCKFGDKCHFAHGERELGRPPSSYMSQESSYAPPMGGRYGGRHEPPLPASMGPPAGNFGASSTCKVSVDAALAGGIIGKGGVNTKQICRITGVKLSIRDHESNPDLKNIELEGSFDQIKQANDMVRDLIASISASTPSKNPASAAAPAGRGGGGGGGGPGGRSNYKTKICENFLKGTCTFGERCHFAHGETEQRKGAAV

SEQ ID NO: 2561 - protein, 96 aa, Zea mays
MASLSMTTSAAARAQWTPRQNKLFEQALAVYDKDTPDRWHNIACAVGGGKSADDVRRYYELLEEDVGHIESGKVPFPAYRYPAGYGAADRLKQLKI

SEQ ID NO: 2562 - protein, 388 aa, Picea mariana
MGRAPCCAKVGLNKGAWSAEEDSLLGKYIQTHGEGNWRSLPKKAGLRRCGKSCRLRWLNYLRPCIKRGNITADEEELIIRMHALLGNRWSIIAGRVPGRTDNEIKNYWNTNLSKKLAVRGIDPKTHKKVTTDSINRASDRFNQRKGGKLYDCSQRSQRLERNVARAGQSTGLVIPNVHNLKADLKGQYIAGPRAIQSSNSIRSSSPINTLIQPKSNELTDDPDFMQPQPVVSSEAGKQTDDSTVYCSSDSAASCALIDHLSSADDDQYLSLEGNSNECYSHTVAEESGTLKSSNPQTHSEAICDSRERDNGGPVQKHDQFPEYDVLSFFDVRNAENEICCNDDQWVHEQEMPQLHSWDNQIDDQGKEHFGSHVNNDVTAMSWEASFWF

SEQ ID NO: 2563 - protein, 139 aa, Triticum aestivum
  misc_feature (127)..(128): Xaa can be any naturally occurring amino acid
  misc_feature (137)..(137): Xaa can be any naturally occurring amino acid
SENQREASEEEAAAERRPEQAQEARVFLPALQVWNALLLPPVNINSERNLIQHRDMANKLLHFLFYCSKEARKQLAEERPGVNNATLSALISVKWKDLSGAEKKVWSEKAAQGMAAYKREMEEYTKXXTSASSSPNXTA

SEQ ID NO: 2564 - protein, 235 aa, Glycine max
MSTTSHPIVHHSLFDEQDQIPTQMGFFSFPTNLTFPPLGCHQSSLKAFSSIAPSSLAISQLDSASNLTAETLFSTTAQKSREDLTSSFGGGQFLSLHRSSVNPWALGEVAECFSSKRSGFDDHHFRISAMKMKKIKARRKVREPRFCFKTMSDVDVLDDGYKWRKYGQKVVKNTQHPRSYYRCTQDNCRVKKRVERLAEDPRMVITTYEGRHVHSPSNDLEDSQTPSQLDSFLLW

SEQ ID NO: 2565 - protein, 118 aa, Brassica napus
MGRCPTRKVKKRRLSHKTARRDKFEVKGDDLVYTELRKPETETKPLELSEDLPGMGQFYCLHCDRYFCNVSVRDDHFKTKKHKKRVKLMNGPAPHSQLDADLAAGMGMPDNGPKLMAA

SEQ ID NO: 2566 - protein, 206 aa, Peperomia caperata
SVLCDAEVAVIVFSTKGKLYEYATDAGMARILDRYEKHTFSNRELELTNLESEGAWSLEYGKLKARFELLQKSHRHYLGEDLGALNMKELQHIEHQLDSALRHVRSRKNQILSDTISDLQTKEKLIHEQNKILQKRIQEKEREITGQPQWEIVPSRQENQNPQPTLFPIPLHTLSIGYCKEDGKAIELGLENEPRPLSQKMPPWML

SEQ ID NO: 2567 - protein, 199 aa, Pisum sativum
SVLCDAEVALIVFSNKGKLYEYSSDPCMERILERYERYSYAERQHVPNDQPQNENWIIEHAKLKARLEVIQKNQRNFMGEELDGLSMKELQNLEHQLDSALKQIRSRKNQVVYESISELQKKDKALQEKNNLLTKKIKEKEKALAQLELHNDDMDLDSTALVPQPLETLNIGCSPQDRGDNEGSQTQSNALLPHWMLRH

SEQ ID NO: 2568 - protein, 213 aa, Petunia x hybrida
ALELSVLCDAEVALIVFSTKGKLFEYSTESSMESILERYERYSYAESQLVANNSQPQGNWSLEHPKLMAKIEVLQRNIRHYVGEELDPLSLRELQSLEQQIDTALKRIRTRKNQLMHESVSELQKKERALQEQNNLLAKKLKDNEKTVAERPQLEQQNLPHNTPTFMFPPPPQSLLHSLTIGGNFQIGQENGAQIRPNSNPLMPPWMLRHVNQ

SEQ ID NO: 2569 - protein, 268 aa, Glycine max
MDRVKGPWSPEEDEALRRLVQAHGPRNWSVISKSVPGRSGKSCRLRWCNQLSPQVAHRPFSPDEDEAIVRAHARFGNKWATIARLLNNGRTDNAVKNHWNSTLKRKKCSAVSDDVTDRPPLKRSASVGPAHLNPGSPSGSDLSDPSLPALSNPSPSAHYRPNLMETASSACDPATSLSLSLPGFGSGSNPVCAPRPVSVSPPSPPPAEPVEQRGKQMFNAEFLRVMQEMIRKEVRSYMSGMEQKNGFRIPTEAIGNAVVKRMGISNIE

SEQ ID NO: 2570 - protein, 210 aa, Petunia x hybrida
AHEMSMLCDAEVALIIFSNRGKLYEFCSSSSMLKTLERYQKCNYGAPETNISTREALEISSQQEYLKLKARYEALQRSQRNLLGEDLGPLNSKELESLERQLDMSLKQIRSTRTQLMLDQLQDLQRKEHALNEANRTLKQRLMEGSTLNLQWQQNAQDVGYGRQATQTQGDGFFHPLECEPTLQIGYQNDPITVGGAGPSVNNYMAGWLP

SEQ ID NO: 2571 - protein, 214 aa, Petunia x hybrida
AHELSVLCDAEVGLIVFSTKGKLFEYSTDSCMERILERYERYSYAERQLSGATDNDTPGSWTLEHAKLKARLEVLQRNQKHYAGEDLDSLSMKELQNLEQQLDSALKQIRSRKNQLMHESISELQKKDKALQEQNNKLSKQVKEREKELAQQSQWEPQSHDLNSSSFVLSQPLNSLHLGEAYPSAGDNGEVEGSSRQQPPNTVMPPWMLRHLNG

SEQ ID NO: 2572 - protein, 517 aa, Ostreococcus tauri
MTRARDNRTSCFAERWLCTTGRIGRRLVRTRTAFEKARQMTSGSRAKTDEMISFVVSIVAVHFSDTRTDVQCLHRWQKVLNPDLVKGPWTTEEDSKIIQLVTELGPKRWSKIASELPGRIGKQCRERWYNHLDPEIKREEWSSEEDRQLILAHAEYGNRWAEIAKSFKGRTDNAIKNHWNSTLKRKVDQALNQGLSALAAAEPSAGGSKGKSLTVKKHAATRKALALNPAHANRSHQPNAGSSLQYRGGVDMSRRASSYAASPTKCGIRRSMFDVSDGEASNPPGIINANIFASPYGSQSVGGSPYSDIRANAVEGSPFRIGEILDEFASASDSPQQLTTSPVFETASTPQGAYHGIGITPPNKLALPSGAAMAAVEGLDVAKIPDARTLEASNINLSNVQMPKMPGINSIEDLQAFVSPDRKKRGRNMRLSHLFRRSGKQAKTSDDSTGVAENVDAVNLMRTVKSANTSMYDRAEELLRGVDVTEVPILAGMTTPTRPRRNDTVAPVPFSPSQFLA

SEQ ID NO: 2573 - protein, 252 aa, Zea mays
MTRQPSSFQFHQPRVAVPPLDSPGSSVDSSAPTWVQQQQRAPPAPVLAFDGNDTDEMALLDMITRQVQGQGQEGATSKQEEAERSLGAGGGRPYRGVRKRPWGKFAAEIRDSTRNGVRVWLGTFDSAEAAALAYDQAAFAMRGEAAVLNFPVERVRQSLEGMGMGMGMPIPGSGSASASPVVALKRRHSMRMRRPASRNRKAKTATRSEVMELEDLGADYLEELLGATATEAEEQTMSHSSSSSWHRSHHSI

SEQ ID NO: 2574 - protein, 293 aa, Oryza sativa (japonica cultivar-group)
MTARSMLRNHPEASVLDTIRQHLLEEPRGGGGGEAAEASFGSLVADMWSDSLPFRDDDADDMVVFGAMRDAFSCGWLPDGVFAEVKPEPLLSPDSSSYDGSGGRGGGGDGGAREGGGGAAAVARGKHYRGVRQRPWGKFAAEIRDPAKNGARVWLGTFDTAEDAALAYDRAAYRMRGSRALLNFPLRIGSEIAAAAAAAAAAAAGDKRPSPEPATSESSFSSSSSCTTTTTSSSTSSSGSPKRRKRGEAAAASMSMPLVPPPSQLNWPVQAWYPAAAPVEQVAITPRVEQLVI

SEQ ID NO: 2575 - protein, 268 aa, Oryza sativa (indica cultivar-group)
MGRGPVQLRRIENKINRQVTFSKRRNGLLKKAHEISVLCDADVALIVFSTKGKLYEFSSHSSMEGILERYQRYSFDERAVLEPNTEDQENWGDEYGILKSKLDALQKSQRQLLGEQLDTLTTKELQQLEHQLEYSLKHIRSKKNQLLFESISELQKKEKSLKNQNNVLQKITTKAVLEVKPFCLHSSEQLMETEKEKNNAIINTNREEQNGATPSTSSPTPVTAPDPIPTTNNSQSQPRGSGESEAQPSPAQAGNSKLPPWMLRTSHT

SEQ ID NO: 2576 - protein, 234 aa, Arabidopsis thaliana
MGRGKIVIRRIDNSTSRQVTFSKRRSGLLKKAKELSILCDAEVGVIIFSSTGKLYDYASNSSMKTIIERYNRVKEEQHQLLNHASEIKFWQREVASLQQQLQHLQECHRKLVGEELSGMNANDLQNLEDQLVTSLKGVRLKKDQLMTNEIRELNRKGQIIQKENHELQNIVDIMRKENIKLQKKVHGRTNVIEGNSSVDPISNGTTTYAPPQLQLIQLQPAPREKSIRLGLQLS

SEQ ID NO: 2577 - protein, 267 aa, Arabidopsis thaliana
MEVLIPVDEMTEGGEYSPAMMSAEPFLTMKKMKKSNHNKNNQRRFSDEQIKSLEMMFESETRLEPRKKVQLARELGLQPRQVAIWFQNKRARWKSKQLETEYNILRQNYDNLASQFESLKKEKQALVSELQRLKEATQKKTQEEERQCSGDQAVVALSSTHHESENEENRRRKPEEVRPEMEMKDDRGHHGVMCDHHDYEDDDNGYSNNIKRECFGGFEEEPDHLMNIVEPADSCLTSSDDWRGFKSDTTTLLDQSCNNYPWRDFWS

SEQ ID NO: 2578 - protein, 142 aa, Brassica rapa subsp. pekinensis
RQVTFCNRRNGLLKKAYELSVLCDAEVTLIVFSSRGRLYEYSNNSVKGTIERYKKAISDNTNTGTVAEINGQYYQQESAKLRQQIISIQNSNRQLMGETIGSMSPKELRNLEGRLDRSINRIRSKKNELLFAEIDYMQKREL

SEQ ID NO: 2579 - protein, 231 aa, Brassica napus
NKTMEVCVTPFPKVSSDVEVMKFPERLFSVPPRVTKGLVEGVNVESYQEDNKLWRKRVSNYKRINRLIGSTRYRNVMDMNAGLGGFAAALESTESWVMNVVPTIAKNTLSVVFERGLIGIYHDWCEGFSTYPRTYDLIHANNVFSLYQNRCNVEDILLEMDRILRPEGTVLFRDEVDVLNDVRKIANGMRWDTKLMDHEDGPLVPEKILVAVKKYWVAGDGVSVGDSTSTF

SEQ ID NO: 2580 - protein, 193 aa, Triticum aestivum
  misc_feature (9)..(9): Xaa can be any naturally occurring amino acid
AEAASRGSXSSNVLSQLAAEGQSRIVGWNLARGSGEREVVHVQEENLSADGTLVLSSSGDSAQSIVLQLVKLPLVDKIPPYTTWIFLDKNQRMADDQSIAGRRRIYYDSAGNEALICSESDEEIPQPEEEKHVFTEGEDQLIWKATQERGLSQEDLNVICQFIDASPSEIEGRSEFLFEKHEKHSEFSDKIES

SEQ ID NO: 2581 - protein, 202 aa, Ranunculus ficaria
NRQVTYSKRRAGIMKKAKELTVLCDAKVSLIMFSSTGKCVDFISPSISPKAFYDKYRDVTGDDLWKSQYDKMQQELKTLVETNRKLRREIGQRVGEDLSNLSIKELRGLEQDLRDTEKVVRQRKFGLLSSQGETQRKKIRNLAEINGNLWQEYQERMEDEYALANGMSTLELGNGVFSFRLRPSQTNLHNDEEYEIHDLRLA

SEQ ID NO: 2582 - protein, 203 aa, Akebia quinata
AGIIKKARELSVLCDAQVSLIMFSGTEKLSEYISPTVTTKKVFDRYQQTAGINLWSTHYERLQENLNKQKEINRRLRKEIRQRMGEDLNELSIDVLRGLEQNMEHSLNIVRERKLKVIRTQSDTYRKKVTHLEQVHNNLMRELVQEGRNEDPHYVFANHNGDYQSALELANNGGSHIFALRLQPSQPILREGGGYGSHDLRLA

SEQ ID NO: 2583 - protein, 295 aa, Hordeum vulgare subsp. vulgare
MHSCNDHGQKVKLNVVQADSAAHGVTAHGARTPPASAVALKPALIRVPSPPVGVTAARAETPLPFPASPACPPLPFLIPSSTPPRPDPVVRPRTNQMASARRLLQTYPGQFQAAEPPDALGADSDVVVILAALLCALLCVVGLAAVTGCARSRRGAGGARSAAPDAAAPSKGLKKRALMALPRLAYEDAVAARGAMAGEEREGVLLSECAICLSEFADKEEIRVLPQCGHGFHVACVDAWLRAHSSCPSCRRVVVVIVADAAPRGMPPQPKRCRKCEAMEEASSSSSSAAAQFLP

SEQ ID NO: 2584 - protein, 241 aa, Oryza sativa (indica cultivar-group)
MQPPPMRERQRWRPEEDAILLAYVRQYGPREWSLVSQRMNRPLHRDAKSCLERWKNYLRPGIKKGSLTDDEQRLVIRLQAKHGNKWKKIAAEVPGRTAKRLGKWWEVFKEKQQRELRDRDRRRLPPPLDGDERGGAGGRYDWLLEDFADKLVNDHHRRMMAAPILPPWMSSSPSSSSSPSVTLSLASAAVAPAPAAPPPTWGGGGGEVVVAELMECCRCLKSFAPYLFKYLILFDFLKKNI

SEQ ID NO: 2585 - protein, 308 aa, Schizosaccharomyces pombe
MESLQRLLQGARMGTGMMGDQPLVDNSECVYISSLALLKMLRHGRHGTPMEVMGLMLGEFVDDFTVRVVDVFAMPQSGTGVSVEAVDPVFQKNMMDMLKQTGRPEMVVGWYNSHPGFGCWLSSVDINTQQSFEQLTPRAVAVVVDPIQSVKGKVVIDAFRLINPSTLMMGQEPRQTTSNLGHINKPSIQALIHGLGRHYYSLRINYKKTELEEIMLLNLHKQPWAHGLLLENFNSAAEKNHASIDKMKSLSEQYTERVQNEVTLSPEQLRIQYVGKQDPKKHLDAEVQKCIDNNISSMLACMLDSVAF

SEQ ID NO: 2586 - protein, 215 aa, Papaver nudicaule
  misc_feature (36)..(36): Xaa can be any naturally occurring amino acid
  misc_feature (168)..(168): Xaa can be any naturally occurring amino acid
RHEMSMLCDAEVALIIFSNRGKLYEFCSSNSMFKTXERYQKCNYGQPEPNVSARESLEHASHQEYLKLKARVEALQRSQRNLLGEDLGPLSGKELEFLEKQLDSSLKQIRSTRTQYMLDQLTDLQRREQMLSDANKTLRRRLEEGAQASQQQWDMQHGVGYSRQQQSXHHQAADHNQGFFHPLECEPTLQIGYQQDQITVAQGAPMGSYMPGWLA

SEQ ID NO: 2587 - protein, 388 aa, Oryza sativa (japonica cultivar-group)
MEPATETTATSPAAAAAAQPEAEAEAEAESAATPVAVAAAAAATYQPPAPVVPVAVAGAAAGRGNGKRKRGRPRKYGPDGSLLRPLKATPISASVPDDSGGGQYTPAAAVGAVMKRGRGRPVGFVSRASPVSVAVTAATSTAAVVVSSPATHTQTPLGPLGELVACASGANFTPHIINVAAGEDVNMKVISFSQQGPRAICILSANGVISNVTLRQQDTLGGTVTYEGRFELLSLSGSFTPTDSGGTRSRSGGMSVSLAATDGRVIGGGVAGLLVAASPVQVVVGSFLPSYQLDQNATKKPVIEITTVPPPPPAIGFTISSGDPMEDSYSGSHGQHRSGAAAATTTTAKANSTSAFRVENWTPPAPPAAEAARTKTPSSEAKVPVPGA

SEQ ID NO: 2588 - protein, 219 aa, Papaver nudicaule
EMSVLCDAEVALIVFSTKGKLFEYSTDSGMDRILERYERYSYAERELVTTEIDQGNWSLEYSKLKSKIEILQKNQRHFMGEDLQSLSLKELQNLEQQLDVALKQIRSRKNQLMYESISELQKKEKALQEQNNKLGKQLKEKEKEVAAQQQQASQWDQQVTQGQSSPSFLLSQSLPNLNIGNGSYQVRGGNNGNEEEIRTQTTRTNTATPMPHWMVNHLR

SEQ ID NO: 2589 - protein, 201 aa, Papaver nudicaule
DAEVALIVFSTKGKLFEYSTDSGMDKILERYERYSYAERELVTNDTDSQGNWSLEYTKLKAKVEILQKNQRHFRGEEIGNLGLKELQNLEQQLDTALKLIRARKNQLLFESISEYQKKEKALNEQNNQLEKQLKEKEKELAKRPQWEQPPNQGQTSQSFTLQSHPSLNIGGNYQGRSSGREDEVPQTQARPTILMPSWMLC

SEQ ID NO: 2590 - protein, 245 aa, Solanum lycopersicum
MGRGRVHLKRIENKINRQVTFSKRRSGLLKKAHEISVLCDAEVGLIVFSTKGKLFEYANDSCMERILERYERYSFAEKQLVPTDHTSPVSWTLEHAKLKARLEVLQRNQKHYVGEDLESLSMKELQNLEHQLDSALKHIRSRKNQLMHESISVLQKKDRALQEQNNQLSKKVKEREKEVAQQNQWEINSSSFVLPQQLDSPHLGEAYQSTNVIDNGEVEGGSSSQQQGAANNTVMPQWMLRHLNN

SEQ ID NO: 2591 - protein, 151 aa, Arabidopsis thaliana
MMNRSMSFTGVSDHLHLTQKSPTTTNNMNDQDQVGEEDNLSDDGSHMMLGEKKKRLNLEQVRALEKSFELGNKLEPERKMQLAKALGLQPRQIAIWFQNRRARWKTKQLERDYDSLKKQFDVLKSDNDSLLAHNKKLHAEVYNIHTNSTNR

SEQ ID NO: 2592 - protein, 210 aa, Papaver somniferum
SVLCDAEVALIVFSTKGKLFEYSTDACMDAILERYERQCCVEEELVGTDQESQGNWSLEHAKLKAKVEVLQRTQRHMMGEDLESFNVKELQNLEHQLDTSLKHIRSKKNQLLYASISELQRKEKALQEQNTILGKKIKEKEQEMGRLDQQQQSNQAQNSCSQAQNSAQNSPTFLLSQELPSLTICTGTYEPAARPIAIQTVMPPWMLRHL

SEQ ID NO: 2593 - protein, 229 aa, Zea mays
MEVAAASAAGYGFKADDDVDSLRATELRLGLPGTEEEEAEESQNKAPPPPPSTPRGKKRDVVASSGPEDAPKKRDCETDTDAAPPPAAKAQLVGWPPVRSYRKSCFQQQAAAKNKPAAALAEEAPAAGGLFVKVSMDGAPYLRKVDLKMYKGYRELREALEAMFLCFSGAGAADAPAVNPSDFAVTYEDKDGDLMLVGDVPFGMFISTCKRLRIMKGSEARGLGSAKNN

SEQ ID NO: 2594 - protein, 159 aa, Solanum tuberosum
  misc_feature (158)..(158): Xaa can be any naturally occurring amino acid
RLLERYERYSYAERQLNATDIETPGSWTLEHAKLKARLEVLQRNQKHYAGEELDTLSMKELQNLEHQLDSALKHIRSRKNQLMHESISALQKKDKALQEQNNNLSKQVKEREKEMAQQTPWEQQSHDHLNSSSFVLPHPFNNLHMGEAYPTAGDNGEXE

SEQ ID NO: 2595 - protein, 248 aa, Oryza sativa (japonica cultivar-group)
MMERAEDLRLSLSLSSPLIAPRTHHVAMLFHAPPEKRFLEMPLLPAAKRSEVVAAEEERAGLRGGGGSDEEDGGCGIDGLTQEAPGLSKDQSAVLEDSFREHPTLNPRQKATLAQQLGLRPRQVEVWFQNRRARTKLKQTEVDCEFLKRCCETLTEENRRLQKEVQELRALKLVSPHLYMNMSPPTTLTMCPSCERVSNTNNNSSAAAAADRRGIRTTTAAGGGSVVDTAADGGILCHRPIAVRPQQS

SEQ ID NO: 2596 - protein, 297 aa, Triticum aestivum
MGAPKQRWTSEEEAALKAGVAKHGPGKWRTILRDTDFSAVLRLRSNVDLKDKWRNLSVTAGGYGSREKARMALKQGKRVPKVNTEPMDVDADNLDNVHDTVIDAKPLAVVVEPSQRECSSEKSVARLDDLILEAIKKLKESSGSNKTAIASYIEEQYWPPADFQRLLSTKLKALVVTGKLMKSNQKYRIAPSSVSLGGRSTKVHSTEDDKQNICIRQLTKPQVDAELDMMTHMNKEEAAAFAAKAVAEAEVANAEAEEAARAAEAAEAEAEAAKAFLDAVMLTVQNKNAASAILRAC

SEQ ID NO: 2597 - protein, 217 aa, Oryza sativa (japonica cultivar-group)
MDDSHDLASPTSPDTASSSSSSTSTSSSSATVAPKKRPRNDGRHPTYRGVRMRSWGKWVSEIREPRKKSRIWLGTFATAEMAARAHDVAALAIKGRTAHLNFPDLAHLLPRPATAAPKDVQAAAVLEVAAADFPSVSVDANAKSPDTCSVASAASPQPPPPDAEADPDSTLFDLPDLLLDLRYETSSSLSCGASWAVDDDVAGGVVFRLEEPMLWDY

SEQ ID NO: 2598 - protein, 693 aa, Oryza sativa
  misc_feature (56)..(56): Xaa can be any naturally occurring amino acid
RPLFFRRGLIVSNATRHDATRRDARKSQKQQQRRSNQAYLHQNLLPPSPLLSTRRXPEPPHRLTPPPPPPRGVPFHRVAFRPSPAERFMRGSRMNPGDRRTRSTMSIVIVMSLCCFFYILGAWQKSGTGRGDSIALRVTKETDCTILPNLHFETHHSLGGVNPLVMTDKVFEPCHIRYSDYTPCQDQNRAMNFPRENMNYRERHCPTETKKLRCLIPAPKGYVTPFPWPKSRDYVPYANAPYKNLTVEKAVQNWVQFEGDVFRFPGGGTMFPNGANAYIDELASVIPFTDGTIRTALDTGCGVASWGAYLMDRNVLTMSFAPRDSHEAQVQFALERGVPAVIGVLGTIKLPYPSGSFDMAHCSRCLISWKSNDAMYMFEVDRVLRPGGYWILSGPPINWKTNHQAWKRSKEDLEAEQNVIEKIAEMLCWGKIHEKGDTVIWRKKADSNECHNKDDHPSKMCKIQDADDVWYKKMEGCITPFPEEAQLRKFPERLFAAPPRILQGRTPGVTEEIFEEDNKLWKKYVSTYKRINKLIGSLRYRNIMDMNAGLGSFAAIIDSPISWVMNVVPTISEKNTLGIIYERGLIGIYHDWCEAFSTYPRTYDLIHANGLFSLYQNKCNMEDILLEMDRILRPEGAVILRDNVEVLNKVRRTVMGMRWKSKLLDHEDGPHIPEKILVSVKKYWVGNEEENSS

SEQ ID NO: 2599 - protein, 230 aa, Brassica napus
MGRGKIEIKRIENSTNRQVTFCKRRNGLLKKAYELSVLCDAEVALIVFSTRGRLYEYANNNIRSTIERYKKASDNTNTHSVQEINAAYYQQESAKLRQQIQTIQNSNRHLMGDSLSALSVKELKQVENRLEKAISRIRSKKHELLLAEIENLQKREIELDNESIYLRTKIAEVERFQQHHHQMVSGTEMTAIEVLASRNYFAHNIMTIGSGSGAGHGCSYFDPDKKTHLG

SEQ ID NO: 2600 - protein, 783 aa, Ipomoea nil
MAAKAFPMVGDAANVSGGATSSREYHLNDSHHNILPLHSSSSSASPSSHLALLCDNAKMVRKRAASEMELQIGGGISEHGRFLRRNAPLLGDLRVCGTNFGGGAGGDNGGGNSLGVSVSHPNHVVVNNYSTMQIAPPPTSTNLSVTSTSDATHLAYMEQLPPNEPQAPLPLCVFSGLPLFPAPSRARNAAGAALQPAPLPVTASGSAIGVNSSSGGGMGDNGTAMAWIDGIIKDLIHISTHVSIPQLIQNVREIIHPCNPNLAALLEYRLRSLTTAAAAADPLAANVYDDWRRKETLQPQSQDAITHPLHLPDSMTPPPWEITLPPAAAAATTRHQLRDNNPSSLPFVPVPSSDRLDQQQQPGRMDNEKQPESQSQSQSPPASENTAAAALIRTESIMRREKEELEQQKKDEEGLHLLTLLLQCAEAVAADNLDEANRMLLQVSELSTPYGTSAQRVAAYFSEAMSARLVNSCLGIYASAPLNALPLSLNQKMASAFQVFNGISPFVKFSHFTANQAIQEAFEREDRVHIIDLDIMQGLQWPGLFHILASRPGGPPLVRLTGLGTSMEALEATGKRLSDFAQKLGLPFEFFPVADKVGNLDPQRLNVNKREAVAVHWLQHSLYDVTGSDTNTLWLLQRLAPKVVTVVEQDLSHAGSFLGRFVEAIHYYSALFDSLGACYGEESEERHAVEQQLLSREIRNVLAVGGPSRSGEVKFNNWREKFQQSGFRGVSLAGNAAAQATLLLGMFHSDGYTLAEDNGALKLGWKDLCLLTASAWRPPPLAQ

SEQ ID NO: 2601 - protein, 292 aa, Oryza sativa (japonica cultivar-group)
MAQEDVGHLSDAGLALGLSLGGGGGGTTDAAAAHRGGCRRPSPSSQCPPLEPSLTLSLPDDAAAGAAATATATASGGGGPAHSVSSLSVGAAAAAAVKRERAEEADGERVSSTAAGRDDDDDGSTRKKLRLTKEQSALLEDRFREHSTLNPKQKVALAKQLNLRPRQVEVWFQNRRARTKLKQTEVDCEFLKRCCETLTEENRRLQRELQELRALKFAPPPPSSAAHQPSPAPPAPFYMQLPAATLTICPSCERVGGPASAAKVVAADGTKAGPGRTTTHHFFNPFTHSAAC

SEQ ID NO: 2602 - protein, 337 aa, Triticum aestivum
NDFALGLFLPPLRPTPPPPNRKLGFPPRRGGLAMDAAARKRSRPESANGGAAGGKRSRESESQQTGLSSKSKPCTKFFSTVGCPFGEGCHFAHFVPGGYQAVSKSHSLGHAAVSAPSRAPADHAASGVKTRMCTKYNTAEGCKFGDKCHFAHGERELGRAPSSYMSQESSYAPPMGGRYGGRHEPPPPASMGPPAGNFGASSTCKVSVDAALAGGIIGKGGVNTKQICRITGVKLSIRDHESNPDLKNIELEGSFDQIKQANDMVRDLIASISASTPSKNPAGAAAPAVRGGGGGGPGGRSNYKTKICENFLKGTCTFGERCHFAHGETEQRKGAAV

SEQ ID NO: 2603 - protein, 336 aa, Triticum aestivum
MEFAGEADDFALDLIREHLLGGDGGVLATANHEQGPFCDDVTFPVLPPSAAEPQAYQQPMFFPQQGQRQEQTQGYMGLTHQYVNSYPAATAVFRAPEPVMIQFGGQPSPVRALSSTLTISVPPQGTFGWAGTAAAAAPAPAPVEDLRKYRGVRQRPWGKYAAEIRDPKRRGYREWLGTYDTSVEAARAYDRAAFRMRGAKAILNFPNEVGTRGAELWARPPAGPASQAAGATNKRKRSQGEDADVEVTGVVINKAVRAEAPSPSSARVSWDTPSSLSRGTASSTVTSVATTPEGEFPPTPSSSGWEQCWEALMGGMPLLSPLSPHPALGFPQLSVS

SEQ ID NO: 2604 - protein, 240 aa, Papaver somniferum
VQLRRMENKINRQVTFSKRRSGLLRPCAEMSVLCDAEVALIVFSTKGKLFEYSTDSGMDRILERYERYSYAERELVTTEIDQGNWSLEYSKLKSKIEILQKNQRHFMGEDLQSMSLKELQNLEQQLDVALKQIRSRKNQLMYESISELQKKEKALQEQNNKLGKQLKEKEKEVAAQQQQASQFSQGQSSPSFLLSQSLPSLNIGSGSYQARGGDNGNEEGNRTQTTRTNTATLMPPWMLN

SEQ ID NO: 2605 - protein, 196 aa, Consolida ajacis
NRQVTYSKRRNGILKKAKEITVLCDAEVSLVVFSSTGKMSEFISPNASLIKILDKYQRTSGRRLWDAKHEYLNSEVERIKKENDNMQIELRHLKGEDLTSLNPKELIPIEAALQNGLTEVRAKQAEVWKMMKKNDRLLEEENKHLNYVLQKQQQMHMNGNARDLENEYHQNGRDYPSHMPFTFRAQPMQPNLQENQ

SEQ ID NO: 2606 - protein, 417 aa, Glycine max
  misc_feature (77)..(77): Xaa can be any naturally occurring amino acid
  misc_feature (129)..(129): Xaa can be any naturally occurring amino acid
  misc_feature (393)..(393): Xaa can be any naturally occurring amino acid
QKTKKNPSIPCTSMSSLSTHHTYSRKQKSLGLLCTNFLSLYNKEGVRLIGLDDAASRLGVERRRIYDIVNILESVGXLARKAKNQCTWKGFSAIHVALQELKDEGLKENPGSSDDSNPSINLVLTVLGXDDEDEEETFPNINTGSQNVMVKSSSKNENRREKSLALLTQNFVKLFVCSNFEMISLDEAAKLLLGNANNRTKVRRLYDIANVLSSMNLIEKVIFSSVHFKFPHRALQWKCCFLYSVLINYSKLMMSLRRLQTHTTNTRKPAFRWLGVRGKTWSESAQTNVKESQKRMFGSDITNINFKRKVDLSMDGQNFKTQNQQENISPRAQLEKKSLKKDAKQTSMSYQFGPFAPAYVHKVGTSENNSVKQVQDWESLAQEHRPQYQNQGXALKDLFSHYMEAWKSWYSEAAKTL

SEQ ID NO: 2607 - protein, 209 aa, Ranunculus bulbosus
  misc_feature (24)..(24): Xaa can be any naturally occurring amino acid
  misc_feature (65)..(65): Xaa can be any naturally occurring amino acid
  misc_feature (67)..(67): Xaa can be any naturally occurring amino acid
  misc_feature (89)..(89): Xaa can be any naturally occurring amino acid
  misc_feature (136)..(136): Xaa can be any naturally occurring amino acid
  misc_feature (185)..(185): Xaa can be any naturally occurring amino acid
  misc_feature (191)..(191): Xaa can be any naturally occurring amino acid
AHEISVLCDADVALVIFSIKGKLXEYSTNDRMEGILERYERYSYTSTELVAADPESQECLSMEYXKXKSKVEALQRSQRYFMGEDIGSXGVKELQALEQQLDTSLRQIRSRKNQLMAGSITELQKNEKALLEENIXLKKQAKEKELALSLCEQLNPVERSPYVPLPDAVPALNTSEPTNQSSGSXGEEEVXAQPSQTKTLMPPWMLHHL

SEQ ID NO: 2608 - protein, 214 aa, Ranunculus bulbosus
  misc_feature (16)..(16): Xaa can be any naturally occurring amino acid
  misc_feature (25)..(25): Xaa can be any naturally occurring amino acid
  misc_feature (32)..(32): Xaa can be any naturally occurring amino acid
  misc_feature (41)..(41): Xaa can be any naturally occurring amino acid
  misc_feature (45)..(45): Xaa can be any naturally occurring amino acid
  misc_feature (169)..(169): Xaa can be any naturally occurring amino acid
  misc_feature (188)..(188): Xaa can be any naturally occurring amino acid
  misc_feature (212)..(212): Xaa can be any naturally occurring amino acid
KAHEISVLCDADVALXIFSIKGKLXEYSTNDXMEGILERYXRYSXTSTELVAADPESQECLSMEYNKLKSKAEALQRSQRHFMGEDIGGLCVKELQALEQQLDTSSRQIRSRKNQLMAGSIIELQKNEKALLEENINLKKQAKEKELALSLCEQLNPVERSPYVPLPDXVPALNTNGPTNQSSGSGGXGGGGEEVVAQPPQTKTPMPPWMLXHL

SEQ ID NO: 2609 - protein, 297 aa, Oryza sativa (indica cultivar-group)
MRGRRCSPTHRRRSSGSASRRWSHAETAAFLAIRADLDHSFLSTKRNKALWEAASARLHALGFARTPDQCKSKWKNLVTRFKGTEGAAAVAAAGTDQMQGGQVGGAAARGSSSSFPFHDELRRIFDARVERARALERKKVKGKDPDDDHDGGGDGDEDDEEEADQQVDEEDDGASGDTTRAGSKKRRRKAAAAARRTGSTGGVEGEVEAMLREFMRRQIEMEERWMEAAEAREAERRAREEEWRTAMVALGEERLALVRRWREREDAWRARAEEREERRHQLVAALLAKLGAGDASA

SEQ ID NO: 2610 - protein, 194 aa, Ranunculus acris
HEMSVLCDADVALIVFSIKGKLTEYSTNDSMESILERYERYSSSCKELPATDPESQECLFRDYNKLKSKVEALQKSQRHLKGEEIGGLGVKELQALEQQLDTSLRQIRSRKNQLMNGSITELHRSSKALHEENVNLKKQAKEMELALSVYKKHNQAPLNVSGTSTQSSETQGEGDVVQPLRAKTLMPPWMLNHL

SEQ ID NO: 2611 - protein, 579 aa, Oryza sativa (indica cultivar-group)
MAASLLLELAAADDVAAVRRVVEEEKVSLGVAGLWYGPSASGVARLGMERRTAAMVAALYGSTGVLGYVVAAAPAEAARASETDGATPLHMAAAGGAANAVAATRLLLAAGASVDALSASGLRAGDLLPRATAAEKAIRLLLKSPAVSPSSSPKKSASPPSPPPPQDAKKEYPPDLTLPDLKSGLFSTDEFRMYSFKVKPCSRAYSHDWTECPFVHPGENARRRDPRRYSYSCVPCPEFRKGGSCRKGDACEYAHGVFECWLHPAQYRTRLCKDEVGCARRICFFAHKPDELRAVNPSAVSVGMQPTVSSPRSSPPNGLDMAAAAAAMMSPAWPSSPASRLKTALGARELDFDLEMLALDQYQQKLFDKVSGAPSPRASWGAAANGLATASPARAVPDYTDLLGSVDPAMLSQLHALSLKQAGDMPAYSSMADTTQMHMPTSPMVGGANTAFGLDHSMAKAIMSSRASAFAKRSQSFIDRGGRAPAARSLMSPATTGAPSILSDWGSPDGKLDWGVQGDELHKLRKSASFAFRGQSAMPVATHAAAAEPDVSWVNSLVKDGHAAGDIFAQWPEQEQMVA

SEQ ID NO: 2612 - protein, 281 aa, Guillardia theta
MSWLSKDLFSFYSDESINISSLALIKMLKHSKAGVPVEVMGLLLGNFVDEINISVNDVFAMPQTGTGISVESLDPSFQTKMLDLLSQLGNKSLIVGWYHSHPGFGCWLSGVDINTQQNFENLNKRSVAIVIDPIQSFKNRMFIEAYRLFSGNQKVRLERESLSITSNIDTKSFQKDDQGINKYYYSLRISTIKNVIEELLISSVFKCSIDSKAFDKKLFISKYNLDITKIIIETIIKLRTLILNIKISNKKIYRSLEELLSKVRKLISKNLIIISNLVTII

SEQ ID NO: 2613 - protein, 533 aa, Solanum peruvianum
MASSGGNMNTFMNSFNSFSSSQFMTSSFSDLLSDNNNNNNSNNDNKNWGFSEDRSKSFPMMNSSTSPASPSSYLAFPHSLSPSMLLDSPVLFNNSNTLQSPTTGSFGNLNSKEGNSRNSEFSFQSRPATSSSIFQSSAPRNSLEDLMTRQQQTTEFSTAKTGVKSEVAPIQSFSHENMSNNPAPVHYCQPSQYVREQKAEDGYNWRKYGQKQVKGSENPRSYYKCTFPNCPTKKKVERNLDGHITEIVYKGSHNHPKPQSTRRSSSQSIQNLAYSNLDVTNQPNAFLENGQRDSFAVTDNSSASFGDDDVDQGSPISKSGENDENEPEAKRWKGDNENEVISSASRTVREPRIVVQTTSDIDILDDGYRWRKYGQKVVKGNPNPRSYYKCTFTGCPVRKHVERASHDLRAVITTYEGKHNHDVPAARGSGSYAMNKPPSGSNNNNNNMPVVPRPIVLANHSNQGMNFNDTFFNTTQIQPPITLQMLQSSGTSSYSGFGNSSGSYMNQMQHTNNSKPISKEEPKDDLFFSSFLN

SEQ ID NO: 2614 - protein, 216 aa, Ranunculus bulbosus
  misc_feature (214)..(214): Xaa can be any naturally occurring amino acid
GLVKKAHEISVLCDAEVALIVFSTKGKLFEYSTDSGMDKILERYERYSYAERELVTNDTDSQGNWSLEYTKLKAKVEILQKNQRHFRGEEIGNLGLKELQNLEQQLDTALKLIRARKNQLLFESISEYQKKEKALNEQNNQLEKQLKEKEKELAKRPQWEQPPNQGQTSQSFTLQSHPCLNIGGNYQGGSSGREDEVPQTQARPTILMPPWMVXHL

SEQ ID NO: 2615 - protein, 323 aa, Oryza sativa (japonica cultivar-group)
MDLMGGYGRVDEQVAIQEAAAAGLRGMEHLILQLSQTGTSERSPAPAQEQQQQVDCREITDMTVSKFKKVISMLNRTGHARFRRGPVVAQSSGPAASEPAPVRSSPSAVSRPMTLDFTKAASGYGKDAGFSVSGISAASSSFLSSVTGDGSVSNGRGGGSSSLMLPPPPATSCGKPPLSSAAAAMSAGAGHKRKCHDHAHSENVAGGKYGSTGGRCHCSKRRKHRVKRTIRVPAISSKVADIPADDFSWRKYGQKPIKGSPFPRGYYKCSTLRGCPARKHVERDPTDPSMLIVTYEGEHRHSPSAAGQDHPPAPPPPLALPLA

SEQ ID NO: 2616 - protein, 558 aa, Oryza sativa
MSAAAEEAAAAAAAEEVEGVEAGKKGVADAKGKGKEKVVVAEEDSAVAAGSGGSGGGRRTLVAYPARVAGYKDVVADAAVFRRALEGLHAQMGTKLKVPIIGGKDLDLHQLFKEVTSRGGIDKKYYMSLLYHFERLYLFEAQGWYQETADSRSISCIEMKAEGQASRKRKRGSNSCSSDPPINLEWTLCSTPLMKVPRYNILAPTIHFGSEKGQAGMKSTWSAQKVLALIGQKLTIKIREIKGKNSQLEHSNPGCRGNHEAIKPLDHLSACYLLYPTSLLSFLYGQRQELVPLTLSDLAASLDNDVQVIIDGKFEHGYIVTVIMGSKSTKAVLYNCTEEPAVPTAVPHVAIDSAEGIRPRRRRRRKKLSTTDPNHPKPNRSGYNFFFQDQHRKLKPEYPGQDRLISKMIGERWNNLGPEDKAVYQEKGVEDKARYQRQLALYREQRTGQPISNAVPIQQRLPQKEVTIDEVDSKVSEGDILLSNQGYSSSTSSSDETADSGEKNVEDDEEFNTETSPEPSMETTDSHGQPDPSADGERFELRRRENPKIDEKRDMPPN

SEQ ID NO: 2617 - protein, 192 aa, Triticum aestivum
GTAAPCATRRRLWGWGVAPRYRGVRKRPWGRFAAEIRDPAKRARVWLGTYDSAEAAARAYDVAARTLRGPLATTNFPQDPVSFPTLPTLPHPSRPASPGPACSASSTVESYSGPRAANAPRAVPRVSAPAPLLAERSGGDAGCQSDCASSASVVDDGGDEAASAAVRPRAPFVFDLNLPPPSDELCTELRLF

SEQ ID NO: 2618 - protein, 362 aa, Oryza sativa (japonica cultivar-group)
MELGLSLGEAMADAGRELVLGLGMGRREEAAEAGRRDHEVRRELEFGSMSSRCGGSSPEPTVRLTLLPMVPGLGLPWPPPPPPSSESRHLEASTRGFDVNRPPSSGGGCGGGGAEEEQDDVAGAALSSSPNNSAGSFPMDDFSGHGLGGNDAAPGGGGGDRSCSRASDEDDGGSARKKLRLSKEQSAFLEESFKEHSTLNPKQKLALAKQLNLRPRQVEVWFQNRRARTKLKQTEVDCEYLKRCCETLTEENRRLQKELAELRALKTVHPFYMHLPATTLSMCPSCERVASNSAPATASSAATSSTAAPPAAPSSGGIAATSSSAAAAAAPDHRPSSFAALFSSPRGFPLSVAPQAQPPTSS

SEQ ID NO: 2619 - protein, 127 aa, Narcissus pseudonarcissus
  misc_feature (79)..(79): Xaa can be any naturally occurring amino acid
LPENGYGSNVTAWPARLHKPPRRLQGVEMDSYIAKNELFIAESKFWSDTVDGYIRVFRWKEMNLRNVMDMRAGYGGFAXALIDQRMNCWVMNVVPISGPNTLPVIYDRGLIGVAHDWCEPFDTYPRT

SEQ ID NO: 2620 - protein, 89 aa, Triticum aestivum
MSSGSRSASRGGANPEWSKKENKLFEEALAYYGEGTPDRWLKVSRAMGGTKNADEVRRHYEILDSDIKLIDSGRLPFPKYNTQGQGAWN

SEQ ID NO: 2621 - protein, 1930 aa, Arabidopsis thaliana
MDYSDDDMIDNESGEENNSDGGGNESYNYNAAVDTIILSEKSYVIIKEEEILKLQRDDIERVSTILFLSQVEAIVLLLHYHWCVSKLEDEWFTDEERIRKTVGILKEPVVDVNGTEVDIQCGICFESYTRKEIASVSCGHPYCKTCWTGYITTKIEDGPGCLRVKCPEPSCYAVVGQDMIDEVTEKKDKDKYYRYFLRSYVEDGKKMKWCPSPGCECAVEFGESSGYDVACLCSYRFCWNCSEDAHSPVDCETVSKWIFKNQDESENKNWILANSKPCPKCKRPIEKSHGCNHMTCSASCGHRFCWICGKSYSDHYACNNYVEDADHDKRTLLQSEIKRYTHYYVRWVENQSSRLKAMSDLEKFQSVQLKQLSDNQCKPKIDLQFIVDAWLQIIECRRVLKWTYAYGYYLDNLAKRPLFEYLQGEAETGLERLHHCAENELKQFFIKSEDPSDTFNAFRMKLTGLTKVTKTYFDNLVKALENGLADPPVMDFSDDDMIDNKSGEENYSYGGGNESDDYNDVVDTIIPSEKSYVILKEEDILKLQRDDIERVSSILSLSQVEVIVLLLHYNWCVSKVEDEWFTDEERIRKAVGLLKEPVVDFNGGEKDKKCRKVNIQCGICFESYTREEIARVSCGHPYCKTCWAGYITTKIEDGPGCLRVKCPEPSCSAAVGKDMIEDVTETKVNEKYSRYILRSYVEDGKKIKWCPSPGCGYAVEFGGSESSSYDVSCLCSYRFCWNCSEDAHSPVDCDTVSKWIFKNQDESENKNWMLANSKPCPECKRPIEKNDGCNHMTCSAPCGHEFCWICLKAYRRHSGACNRFVVEQAESKRALLQSEIKRYTHYYVRWAENQSSRLKAMRDLEKLQSVQLKELSDNQCTSETQLQFTVDAWLQIIECRRVLKWTYAYGYYLQDLPKRKFFEYLQGEAESGLERLHHCAENELKQFFIKSEDPSDTFNAFRMKLTGLTTVTKTYFENLVKALENGLTVMSSSDRDIIDIESGEEDLYSDGGNDIIDIESGEEDLYSDGGNVSDDYNPVDDTISRSEKSYVVVKEEDILKLQRDDIEQVSTVLSVSQVESIVLLLHYHWCVSKLEDEWFTDEERIRKTVGILKEPVVDVNGTEVDIQCGICFESYTRKEIARVSCGHPYCKTCWTGYITTKIEDGPGCLRVKCPEPSCYAVVGQDMIDEVTEKKDKDKYYRYFLRSYVEDGKKMKWCPSPGCEYAVEFGVNGSSSYDVSCLCSYKFCWNCCEDAHSPVDCETVSKWLLKNKDESENMNWILAKTKPCPKCKRPIEKNTGCNHMSCSAPCRHYFCWACLQPLSDHKACNAFKADNEDETKRKRAKDAIDRYTHFYERWAFNQSSRLKAMSDLEKWQSVELKQLSDIQSTPETQLSFTVDAWLQIIECRRVLKWTYAYGYYILSQERNKRVFARSVFAEAENGLERLHHCAEEELKQFIGKIEDPSKNFGELRAKLIDLTKATKTYFENLVKALENGHINPMIQLAKRLSKKGITSTLIIASKDHREPYTSDDYSITVHTIHDGFFPHEHPHAKFVDLDRFHNSTSRSLTDFISSAKLSDNPPKALIYDPFMPFALDIAKDLDLYVVAYFTQPWLASLVYYHINEGTYDVPVDRHENPTLASFPGFPLLSQDDLPSFACEKGSYPLLHEFVVRQFSNLLQADCILCNTFDQLEPKVVKWMNDQWPVKNIGPVVPSKFLDNRLPEDKDYELENSKTEPDESVLKWLGNRPAKSVVYVAFGTLVALSEKQMKEIAMAISQTGYHFLWSVRESERSKLPSGFIEEAEEKDSGLVAKWVPQLEVLAHESIGCFVSHCGWNSTLEALCLGVPMVGVPQWTDQPTNAKFIEDVWKIGVRVRTDGEGLSSKEEIARCIVEVMEGERGKEIRKNVEKLKVLAREAISEGGSSDKKIDEFVALLT

SEQ ID NO: 2622 - protein, 196 aa, Helleborus orientalis
NGIVKKARELSVLCDDAEVALIMFSSTGKLSEYISPSTTPKKIYDRYQQIIGTNLWNSHYEKMQEILKKQKETNMKLRKEIGQRIGEGIDNLSFDELRGLEQDLDGSLNVVRDRKYHIISTQTETYRKKLKNLQETHTLLMREFEIRGEDPYYEGDYESILGMSNGGAHILSYRLQPNRGNLPDADGYGSSSLQLA

SEQ ID NO: 2623 - protein, 162 aa, Coprinopsis cinerea okayama7#130
MSAAQQSQGQQVINIADLDIAQLGEIKKQLEEELNHLTSSFAKLKQAQGKFKACVQNVKDVKPDNADKTILVPLTNSLYVPGKLTDTKYVIVDVGTGYYVKKTREQAQKYYEAKIDYLQTNLVKLEDTINRKRENMSMVVNVIQQKVAAAASSAGPAGQKKS

SEQ ID NO: 2624 - protein, 525 aa, Oryza sativa (japonica cultivar-group)
MESGYSDVDDDYFGDSDEDYGDDGDYMDDDGDDYGGQVVEETEAPAMEKTYVVLTEDDVRARQEEDIAKVCEVLSLSPGAAAVLLRLYRWRAVLLQEEWFLDERRIRDAAGLLPADGGGGEVPARVNRRRLTCAICFDVFDTGGMRSAGCSHFYCVSCWRGYVRAAVGDGARCLSLRCPDPSCPAAVVRELVDAVADGEDRERFGWFALRSYVEESAGMRWCPGPGCSRAVEFVGGGDGEESSEVFCSCGHGLCWRCGEEAHRPVSCKTVAKWVEKNSSESETATWLLAHTKHCPKCRLPIEKNLGCMHMTCRPPCLHEFCWICLKPWHGHAACSRYQPNGTVVALAGANADDERRRQAKASLDRYLYHYERWDANLKSLRVALRDMESLERSELEAMASAAGVPATEMGFVTEAYEQVGEGRRVLGWAHAYGYYLDPDRDFTKRQLFEYLQEDANASLERLHGCAERERRELFAAGADDKAAVDFDKYRAYREKLAGLTRVTRQYFGNLVKAFETDLAEVSSSS

SEQ ID NO: 2625 - protein, 223 aa, Lolium perenne
MDAASSSDQEKGPHRTVWSEPPKRPAGRTKFKETRHPVYRGVRRRGRAGRWVCEVRVQGTRSSRLWLGTFTTAEMAARAHDAAALALSGRDACLNFADSAWRMLPVLAVGSFGFGSEREIKDAVALAVLAFQRQQQQQQPAASLTPSSSPVQAVDGEKELHGSPAPSTLSMSSSDLLDEHWFGGTDAGSYYDNLTQGMLVEPPTSRTWQEDGVQTPLWSYLFE

SEQ ID NO: 2626 - protein, 226 aa, Zea mays
NAGDQQTEGSSQPERNSMEEGNRKISPKIQSKEDSSDGDGTKEDYVHIRAKRGQATNSHSLAERLRRKKISERMKLLQDLVPGCSKITGKAVMLDEIINYVQSLQRQVEFLSMKLSTVNPELGFDIEQIISKQMMLSQDRHLAFYGVDPGSSSLTAPFNQGIVQPAMMCNISNPADVLHGTIHDVSTMNQIPSMWEGLQSMPQMNFNPGVAADSGTNNSGSMKIEQ

SEQ ID NO: 2627 - protein, 282 aa, Solanum tuberosum
MVGKTSSDLPPGFRFHPTDEELIMYYLRYQATSRPCPVSIIPEIDIYKFDPWELPEKAEFGENEWYFFTPRDRKYPNGVRPNRAAVSGYWKATGTDKAIYSANKYVGIKKALVFYKGKPPKGVKTDWIMHEYRLSDSKSQTYSKQSGSMRLDDWVLCRIYKKKNLGKTIEMMKVEVEELEAQNVSINNAIEVVGGPQTMKLPRICSLSHLLELDYYGSIPQLLSDNLLYDDQSYTMNNMSNTSNVDQVSSQQQNTNNITSNNCNIFFNYQQPLFVNPTFQSQ

SEQ ID NO: 2628 - protein, 224 aa, Lolium perenne
MDAASSSDQEQGPQTHRTVWSEPPKRPAGRTKFKETRHPVYRGVRRRGRAGRWVCEVRVLGTRSSRLWLGTFTTAEMAARAHDAAALALSGHDACLNFADSSWRMLPVLAAGSFGFGSAREIKDAVALAVLAFQRRQQQPAASLVPSSLPAQAAADEKDFHGSPAPSTLSMSSSDLLDEHWFGGTDAGGSCYDHLTQGMLVEPPTSRTSQEDGLQTPLWSHLFE

SEQ ID NO: 2629 - protein, 207 aa, Ranunculus bulbosus
RHEMSGVCDAEVALIVFSTKGKLFEYSTDSGMDKILERYERYSYAERKLGASDTDSQGNWSLEYTKLKAKVEILQKNQRHFRGEDIANMSLKELQNLEQQLDSALKLIRARKNQLTYESISDLQKKEKVLQEQNNQLEKQLKEKEKELAKREQWEQPNQGQTSRSFTPQSPSSLNIGGSYQGNNGGEGFQTQNRPTILMPPWMLSHL

SEQ ID NO: 2630 - protein, 223 aa, Solanum tuberosum
MAPKEKIGAVTAAAVMAVGKLNGISKEVHYRGVRKRPWGRYAAEIRDPGKKSRVWLGTFDTAEEAAKAYDNAAREFRGAKAKTNFPQLLKEEDLKFPVKNEINRSPSQTSTVESSSPVMVDSSSPLDLRLCGSIGGFNHNTVRFPISGGGFTGAVPAVNHMYYLDALERAGVINLETNRKKTVDFLGGGDSDTSTVIDFMRVDVKPTIAGLNLDLNFPPPENM

SEQ ID NO: 2631 - protein, 215 aa, Ranunculus bulbosus
ALRHEMSVLCDAEVGLIIFSARGKLYEFASAGGMSRTLERYHKNSFSNQDSNLAIDRETQSWYQEVSKLKAKYESLQRSQRHLLGEDLGPLNVKELQNLEKQLEGALAQARSRKTQIMLEQMEALRRKERELGDMNKQLKNKYQLEAEGQGSLRAMQGSWESNALNNYSGHPSHSSSMDCEPTLQIGYHQYVSADGGPIQRNNAGENNFIQGWEL

SEQ ID NO: 2632 - protein, 210 aa, Syringa vulgaris
SMLCDAEVALICFSYKGKLFEYATDSCMDRILEKYERYSFAERQLVTNEPQSPANWTLEYSKLKARIELLQRNHSHYMGENLDSMSLKELQNLEQQIDTALKNIRSRKNQQLHESISEMQKKEKALREQNNMLEKKIKEKEKEMAVQPQWGLPNHGANGPQFLLAPQLPGLNIGGAYEGESAEATRNELDLTLEPVYNCKGEFQHTGGRY

SEQ ID NO: 2633 - protein, 260 aa, Oryza sativa
  misc_feature (82)..(82): Xaa can be any naturally occurring amino acid
  misc_feature (101)..(101): Xaa can be any naturally occurring amino acid
  misc_feature (181)..(181): Xaa can be any naturally occurring amino acid
MLRPSTPTRRLLQSVGGGSNPNRIPGIPPADPPSGGVSSDVVVILAALLCALICVVGLAAVARCARNRRNSGGAGAGAGSAXPSHRPAHAGHFGGGGSGGXGGVTTTTTTTTAAKTAAKGLKKKAQKAQPKLAYADAVAAAAAARGTVVGEEEEGKLEVLAECAICLSEFGEREEVRVLPXCGHGFHVACVDTWLRSNSSCPSCRRPIVLDDPSPPKRCRKCEAIVLEAVVAASSSSSSSAATATGSGGGGGGGGGRFLP

SEQ ID NO: 2634 - protein, 232 aa, Syringa vulgaris
  misc_feature (231)..(231): Xaa can be any naturally occurring amino acid
RMENKINRQVTFAKRRNGLLKKAYELSVLCDAEVALIIFSNRGKLYEFCSSSSMLRTLERYEKCNYGAPEPHVSSREALELSSQQEYLKLKARYEALQRSQRNLLGEDLGPLNSKELESLERQLDMSLKQIRSTRTQAMLDTLTDLQRKEHALNEANQSLKQRLMEGNHISLQWNQDPEEVGYGREPTQHQPHGFFHPLECEPTLQIGYQNDPMAAAGPSLNNFMSGWLPXI

SEQ ID NO: 2635 - protein, 277 aa, Brassica oleracea
MNTFPASTEMVGSENESPVTTVVGGDYYPMLAASCPKKPAGRKKFQETRHPIYRGVRLRKSGKWVCEVREPNKKSRIWLGTFKTAEMAARAHDVAALALRGRGACLNYADSAWRLRIPETTCHKDIQKAAAEAALAFEAEKSDVTMEETMAVASQAEVNDTTTDHGMNMEEATAVASQAEVNDTTTDHGVDMEETMVEAVFTEEQSEGFNMAEESTVEAAVVTDELSKGFYMDEEWTYEMPTLLADMAAGMLLPPPSVQWGHNDDLEGDADMNLWSY

SEQ ID NO: 2636 - protein, 270 aa, Oryza sativa (japonica cultivar-group)
MGRGRIEIKRIENTTSRQVTFCKRRNGLLKKAYELSVLCDAEVALIVFSSRGRLYEYSNNNNVKATIDRYKKAHACGSTSGAPLIEVNAQQYYQQESAKLRHQIQMLQNTNKHLVGDNVSNLSLKELKQLESRLEKGISKIRARKNELLASEINYMAKREIELQNDNMDLRTKIAEEEQQLQQVTVARSAAMELQAAAAAQQQQQNPFAVAAAQLDMKCFFPLNLFEAAAQVQAVAAQRQQIIPTELNLGYHHHLAIPGAAAADAPPPHF

SEQ ID NO: 2637 - protein, 207 aa, Syringa vulgaris
ALVQLRRMENKINRQVTFAKRRNGLLKKAYELSVLCDAEVALIIFSNRGKLYEFCSTSNMLKTLERYQKCSYGSLEVNNSTRDLEESSNREYLKLKSKYESLQRHQRHLLGDELGPLNINDLEHLEHQLETSLKHIRSTRTQVMVDQLSDLQAKEKMMVETNTALERKLEEIYAANQLQQSWAGGEQSCAYSQQHLNLRTFFNLWMQ

SEQ ID NO: 2638 - protein, 274 aa, Triticum aestivum
FWHPFHSKQAGQGEGRRWRRKRRAKEKKSSALVGGAARRLPPLLVRSSSVRRVSAVDSGAEGSMSTANGTRRASRRQSQDADKVVVNLVSTPPAAGSRRGVSTSNAGARTSPIDVEALEDEVQVVSASQVPPQRRNRRPRRQPVTVVDLDVHATRQGVSHDDNATVLSHNTRNKRPRVSPVINISPETGEGSSLQSKNAGKTSKEPLNVAPKEPIFTCPVCWNKLDEPATTMCGHIFCTNCIKQAIQFQKKCPTCRKHLKMNNFHRIYLPNTSR

SEQ ID NO: 2639 - protein, 117 aa, Glycine max
SGNKRTNKLQSFGQSFIRNRACGGGRTLRAQKNVMKCPSCSNDIADFLQNPQVNREMLAVIESLQRQAEENSEELSDKNDENLHDPTEVSKPSDSTDKVLEEIKDNELNQPHKRRKE

SEQ ID NO: 2640 - protein, 250 aa, Brassica oleracea
MNSVSTFSELLGSENESPVGGDYCPMLAASCPKKPAGRKKFRETRHPIYRGVRLRKSGKWVCEVREPNKKSRIWLGTFKTAEIAARAHDVAALALRGRGACLNFADSAWRLRIPETTCAKDIQKAAAEAALAFEAEKSDTTTNDHGMNMASQAEVNDTTDHGLDMEETMVEAVFTEEQRDGFYMAEETTVEGVVPEEQMSKGFYMDEEWMFGMPTLLADMAAGMLLPPPSVQWGHNDDFEGDADMNLWNY

SEQ ID NO: 2641 - protein, 423 aa, Oryza sativa (indica cultivar-group)
MDAQYNPRTVEEVFRDFKGRRAGLVRALTADVEDFFRQCDPAALVGSCLDSWEHMSQAYNGRRRSTLLALLQAMLLVPTRFSYVTTVFRKTTVGSKEKENLCLYGFPNEHWEVNLPAEEVPPELPEPALGINFARDGMQEKDWLSMVAVHSDAWLLSVAFYFGARFGFDKNDRKRLFGMINDLPTIFEVVSGKSKAKPPSANNHSNSKSKSSNKTKSSEPRAKQPKPQPQPPVKNEGREEEGGPDDEEGGGGGGGGREEEHGETLCGACGESYGADEFWICCDICEKWFHGKCVKITPAKAEHIKQYKCPSCSGGNGGGGGGSGNGKQLKICSTKREAIISQYLVRDERSKNTSTHARSPLISDNPYEVISDIRIMLAEQYTTNAREDDFDAKPNDKYNQGEGNVAWGGINKELYSLQVTIQN

SEQ ID NO: 2642 - protein, 236 aa, Triticum aestivum
  misc_feature (227)..(227): Xaa can be any naturally occurring amino acid
MSDPSSTASSYSTSPRLTTGVVNFLARRAMTTQNHHRAAASLHSPGSSTGSADTAPWHHRAPATPPPLLPFHASDADEMLLLDMLSQHQEDMHTDTATAPVPTATAATAVKREVSEEEEAKVAAGGSRRAFRGVRKRPWGKFAAEIRDSTRDGVRVWLGTFDSPEAAALAYDQAAFAIRGGAAVLNFPARQVRRSLEGAKDDVCGRAHGLSPVLALKRRPSMHREAXDKQKVRTVR

SEQ ID NO: 2643 - protein, 306 aa, Oryza sativa (indica cultivar-group)
MRGGGGGDAGTSSRGGGSGGAPARPRRFPEAAQPEIMRAAEKDDGYAAHVTEACRDAFRHLFGTRVAVAYQNEIKLLGQSLYYLLTTGSGQQTLGEEYCDISQVATSHGLPPTPARRILFILYQTTVPYLAERISSRIVARGIALEDSQLDDHSESDSSSIGTAAQPSPIRNSPSRSLSFSHLSRLRGRVHTLWEWVLRKWPSMLPFAQDFIQLTIRTNLMFFYFEGLYYHLPKRAAGIRYVFIGKPLNQRPRHPVVRANAPFVSVPVRIPLPQPVAMSSAGVALWSGVMRSLNAPYAELRLHIRV

SEQ ID NO: 2644 - protein, 291 aa, Glycine max
TTILNTVSIEQKMREEDSNWFSRWEEEFPSPEELMPLSQTLITPDLAMAFDIRNPHTTNTAQQQHHQHQQQPQQQQQPSNPSSLPNPLQQQQQQQQQQQQPTSAEFADSGELGSGTAGEEPARTLKRPRLVWTPQLHKRFVDAVAHLGIKNAVPKTIMQLMSVDGLTRENVASHLQKYRLYLKRMQGISAAGPGGPGGGASGAVADPATDHLFASSPVPAHFLHPAARPNSDHFLPFVPALHPHQQQQQMAAAAQYHRQVRHFGSPPNGHFENPFMSRPHLQRLGGGGGGG

SEQ ID NO: 2645 - protein, 222 aa, Pinus radiata
MGRGKIEIKRIENTTNRQVTFCKRRNGLLKKAYELSVLCDAEVALIVFSSRGRLYEFANHSVKRTIERYKKTCVDNNHGGAISESNSQYWQQEAGKLRQQIDILQNANRHLMGDGLTALNIKELKQLEVRLEKGISRVRSKKNEMLLEEIDIMQRREHILIQENEILRSKIAECQNSHNTNMLSAPEYDALPAFDSRNFLHANLIDAAHHYAHQEQTTLQLG

SEQ ID NO: 2646 - protein, 377 aa, Glycine max
MELGLSLGDSSRPLLGFMEKPREATSNQLGLGFNTTLSIGPIITRQKDHQQDEDEEYQDEETKPNNNNNTHRTEDPNDLCSKPNNNTVLHQLDFLPQLALPWHPPSENGSLSSELGGSSRGLDVNVQPPAAEDEAARSSSPNSAASSFQMDLCIYNSRGGSSNKRDFEGEAYDQRTSSRASDDDDNNGSGGNTRKKLRLSKEQSAFLEESFKEHNTLNPKQKLALAKQLNLQPRQVEVWFQNRRARTKLKQTEVDCEYLKRCCETLTEENRRLHKELQELRALKTSNPFYMQLPATTLTMCPSCERVATNSTSTSSSMSATINATNSGATACVKTGNNNNNNDSPSKPIGFPFGKPRFHPFVHSSQQQLHQHQSSAS

SEQ ID NO: 2647 - protein, 227 aa, Helianthus annuus
MKRDYPNQNHTLFPGSSSSTPPLLPDLTGKSKMWDEFNEQDAGDDELLAVLGYKVKSSDMVDVAQKIEHLEGVLSNDDGLSQMASDSVHQNPSDLSSWLESMICELNPVVQVQLPGSGSIAGSLVGTSTSPGSAGVDDLQAIPGDAIYPPTKKQKSLSEDHGNKTYSPNPIVIIDSQENGIRLVHTLMACAEAVQQDDMKRAETLVKQAGYLAVSQAGAMRKVATYF

SEQ ID NO: 2648 - protein, 267 aa, Glycine max
  misc_feature (104)..(104): Xaa can be any naturally occurring amino acid
MESEDDMHDANDIESLDDDFYSGETEDAPLDYYSDDDADDYFDDAERIESRRPEQNFTILKESDIRLRQEDDVTRVATVLSISRVFASILLRHHNWSVSRVHDXVADEERVQPHTCGICFENYPRARIEMASCGHPYCISCWEGYISTSINDGPGCLMLRCPDPTCDAAVAPVLPIRLGSDEDKQKYARYLLRSYIEDNKKSKWCPAPGCEYAVTFDAGSTGNYDVSCLCSYGFCWNCTEEAHRPVDCGTVAKWILKNSAESENMNW

SEQ ID NO: 2649 - protein, 333 aa, Hordeum vulgare subsp. vulgare
MEEVFSSNSKSKAGQMAGEAAAAAEKKSRPKPEQKVECPRCKSGNTKFCYYNNYSMSQPRYFCKACRRYWTHGGSLRNVPIGGGCRKPKRPGTSDAHKLGMASSSEPTGVVPPSNCTGMNFANVLPTFMSGGFDIQSSLSLTTFGSSSSSNPTALMSPGGTTSFLDVLRGGAGGLLDGSLGPNNGYYYGGHANGSSIGMLMTPPTVSFGIPSPMQQHGGLVVGGNGIGGTTSSTFQGSAGEEGDDGTGSIMGLQWQPHVGNGGGGVVGLGGAHHLGTGNNVTMGNNNNNNNQNNNNGGGAGDDDDGGSSRDCYWINNGGSNPWQSLLNSTSLM

SEQ ID NO: 2650 - protein, 1796 aa, Helicobacter pylori
MNEENDKFETSKKTQQHSPQDLSNEEATEANHFEDSSKESKESSEHHLDNPTETKTNFDEYESEETQTQMDSGGNETSESSNGSLADKLFKKARKLVDNKRPFTQQKNLDEEIQEPNEEDDQENNGYQEETQMDLIDDETSKKTQQHSPQDLSNEEATEANHFEDSSKESKESSEHHLDNPTETKTNFDEYESEEITNDSNDQEIIKGSKKKYIIGGIVVAVLIVIILFSRSIFHYFIPLEDKSSRFSKDRNLYVNDEIQIRQEYNRLLKERNEKGNMIDKNLFFNDDPNRTLYNYLNIAEIEDKNPLRAFYECISNGGNYEECLKLIKDKKLQDQMKKTLEAYNDCIKNAKTEEERIKCLDLIKDENLKKSLLNQQKVQVALDCLKNAKTDEERNECLKLINDPEIREKFRKELGLQKELQEYKDCIKNAKTEAEKNECLKGLSKEAIERLKQQALDCLKNAKTDEERNECLKNIPQDLQKELLADMSVKAYKDCVSKARNEKEKKECEKLLTPEAKKLLEEAKESLKAYKDCVSRARNEKEKQECEKLLTPEAKKLLEEAKKSLKAYKDCVSRARNEKEKQECEKLLTPEAKKLLEQQALDCLKNAKTDEERNECLKNIPQDLQKELLADMSVKAYKDCVSKARNEKEKKECEKLLTPEAKKLLEEAKESLKAYKDCVSRARNGKEKQECEKLLTPEAKKLLEEAKKSLKAYKDCVSRARNEKEKQECEKLLTPEAKKLLEQQALDCLKNAKTEAEKKRCVKDLPKDLQKKVLAKESVKAYLDCVSRARNEKEKKECEKLLTPEAKKLLEEAKESLKAYEDCVSRARNEKEKQECEKLLTPEAKKLLEQQALDCLKNAKTEAEKKRCVKDLPKDLQKKVLAKESVKAYLDCVSRARNEKEKQECEKLLTPEAKKLLEEAKESLKAYKDCLSQARNEEERRACEKLLTPEAKKLLEQEVKKSVKAYLDCVSRARNEKEKQECEKLLTPEAKKLLEQQALDCLKNAKTEAEKKRCVKDLPKDLQKKVLAKESVKAYLDCVSRARNEKEKKECEKLLTPEAKKLLEEAKESLKAYKDCLSQARNEEERRACEKLLTPEAKKLLEQEVKKSVKAYLDCVSRARNEKEKQECEKLLTPEARKFLAKQVLNCLEKARNEEERKACLKNIPKDLQKNVLAKESLKAYKDCLSQARNEEERRACEKLLTPEARKLLEQEVKKSVKAYLDCVSRARNEKEKQECEKLLTPEARKFLAKELQQKDKAIKDCLKNADPNDRAAIMKCLDGLSDEEKLKYLQEAREKAVLDCLKTARTDEEKRKCQNLYSDLIQEIQNKRTQSKQNQLSKTERLHQASECLDNLDDPTDQEAIEQCLEGLSDSERALILGIKRQADEVDLIYSDLRNRKTFDNMAAKGYPLLPMDFKNGGDIATINATNVDADKIASDNPIYASIEPDITKQYETEKTIKDKNLEAKLAKALGGNKKDDDKEKSKKSTAEARVESNKIDKDVAETAKNISEIALKNKKEKSGEFVDENGNPIDDKKKTETQDETSPVKQAFIGKSDPTFVLAQYTPIEITLTSKVDATLTGIVSGVVAKDVWNMNGTMILLDKGTKVYGNYQSVKGGTPIMTRLMIVFTKAITPDGVIIPLANAQAAGMLGEAGVDGYVNNHFMKRIGFAVIASVVNSFLQTAPIIALDKLIGLGKGRSERTPEFNYALGQAINGSMQSSAQMSNQILGQLMNIPPSFYKNEGDSIKILTMDDIDFSGVYDVKITNKSVVDEIIKQSTKTLSREHEEITTSPKGGN

SEQ ID NO: 2651 - protein, 123 aa, Fagus sylvatica
LMSLLLLSGRLVRERIGPAMLSAVQSQMGAVETNFDEIPNIFDTGSAKGLPGDSVEKIPKIIITTNNNVDASGDRVSCSVCLQDFQLGETVRSLPHCHHIFHLPCIDKWLLRHGSCPLCRRDL

SEQ ID NO: 2652 - protein, 443 aa, Oryza sativa (japonica cultivar-group)
MDFSCLQPHSGGCDDMPFDSYVQQNGHQELHLVDHPFNNVTDGHEYYSPSAGGSFLPFATYYDLGHEYYPQGGEKDAVVVDRASPTIRKASPHLPLFTPKSEVSHLIGGGVVGSYKAFEMNSRLIRRKRASGKSLKKANVVKGQWTLEEDRKLVKLVEQFGLRKWSHIAQILPGRVGKQCRERWHNHLRPNIKKDTWSEEEDIVLIQTHKEVGNKWAEIAKHLPGRTENSIKNHWNATKRRQFARRRSRASSKNPKSGTLLQNYIKSLGIGPIKSSVRQAPPESTAVSSSSPASTQKLAEVNGKIRPDSNPSNQMVTQGILTMDENSYIQTNSCEELLVSTYDDLCLDMCDHLFETKDEMPYQVYNIDDDVDMNYIFNHIDYANKIGHEIDMEMAWDDDVLQDDESAGSSPLETPAGLAQINTVHVKEEMDLIEMVTRTQSCG

SEQ ID NO: 2653 - protein, 210 aa, Lolium perenne
MDAASTSSQEQPHSHRTVCSEPPKRPAGRTKFHETRHPVYRGVRRRGRVGQWVCEMRVHGARGSRLWLGTFATAEMAARAHDAAALALSGPDACLNFADSAWRMLPVLAAGSFGFGSTREVKAAVALAVVAFTVRATPVAEKVVISSPAPSAALFYMSSGDLLELDDEHWFGGMVAGPYYESLAQGMLVEPPDAGAWREDGGAVQTPLWS

SEQ ID NO: 2654 - protein, 262 aa, Solanum tuberosum
MGSGKLGDSGMIAITAKVMMAVVVFLFFAVVLVFFLHIYSKFFTREDANPNDSTRRRRRRRRFDFAGGYQEVNALRGGLDRSILKTIPVIPFDTKDFKDGLECSVCLSEVCEGEKARLLPKCNHGFHVDCIDMWFQSHSTCPLCRNPVSEMSSTKSIIVESNSGAIRAPVEQGSVASTETRNLPTNVLFWGDETTTSSASTSTSRPDGVLMIDIPRQNSEEAEEEQKTPTPTRLRSLTRLFSSLNPCSPRNVDVEQGSRGQS

SEQ ID NO: 2655 - protein, 202 aa, Syringa vulgaris
NGLFKKAHELTVLCDAKVSIIMISSTQKIHEYISPTSSTKQLFDLYQTTVGVDLWITHYERMQEHLRKLKDINKNLRREIRQRMGESLNDLNYDQIVSLIEDVDDSLRKIRERKYKVIGNQIETSKKKLRNVEEIHRNILLEFDARQEDPQYGLVDNEGDYNSVLGFPNGGPRIIALRLPSNHHPNLHSGGGSDLTTFALLE

SEQ ID NO: 2656 - protein, 232 aa, Medicago truncatula
MALEALNSPTSTTPKFTFDEPNLPWTKRKRSKRSRSCTEEEYLALCLIMLARGHTNRHDFNPLNPPPTTIDNNNNNTKLSYKCSVCNKEFSSYQALGGHKASHRKNSVGGGGDDHPSTSSAATTSSANTNGGGVRSHECSICHRSFPTGQALGGHKRCHYEGVVGGGASAVTVSEGMGSTHSHQRDFDLNIPAFPEFANKVGEDEVESPHPVMMKKKARVFVVPKIEIPNFQ

SEQ ID NO: 2657 - protein, 207 aa, Pachysandra terminalis
NGIFKKALELSVLCDAKVSIIMVATNRKLHEYTSPHTTTKELYDLYQKASGKSLWNSHYERMNDNLNKLKEINNKLRTEIRQRMGEDLNELRLDELRGLEQNMEECLKNIRDRKEHQLRNQIGTSKKKTRNAEEINRKLIRRLDGMDDDSQYGLEDDGVDDEPAIALTNGNSHIFAFRLHPNQPNLHINGGGYGFHNLHLAWKKLPS

SEQ ID NO: 2658 - protein, 113 aa, Zea mays subsp. parviglumis
MGRRACCAKEGVKRGAWTSKEDDALAAYVKAHGEGKWREVPQKAGLRRCGKSCRLRWLNYLRPNIRRGNISYDEEDLIIRLHRLLGNRWSLIAGRLPGRTDNEIKNYWNSTLV

SEQ ID NO: 2659 - protein, 353 aa, Oryza sativa (japonica cultivar-group)
MEEGGRGVKRPFFTTPDELLEEEYYDEQLPEKKRRLTPEQVHLLERSFEEENKLEPERKTELARKLGLQPRQVAVWFQNRRARWKTKQLERDFDRLKASFDALRADHDALLQDNHRLHSQVMSLTEKLQEKETTTEGSAGAAVDVPGLPAAADVKVAVPDAEEPALEEAAAAFEEQQEQQVKAEDRLSTGSGGSAVVDTDAQLVVGCGRQASRRRGQQRGVVLPGRRRVPRLRDGPHGPRRGGHPVGGGRRRRQRRGLQLLRRRRRRPLRRPRPPPPPPTRGRRRGGRPADQLLVDVELDFSRARVVVHSILVLKKSFSFSFFRFFVCNVEFRSAMRRKEVYACAWYGRVTHR

SEQ ID NO: 2660 - protein, 193 aa, Triticum aestivum
  misc_feature (96)..(96): Xaa can be any naturally occurring amino acid
ASEGVHSMSNTSGARRAARRQSLDGSADKVVVDLDASSPVAGNHHGLSVFPGARTSPIDVEALDDEVQALSPSQVPPPGIMQLCLLITRGTNAKGXAPLICLSPEREEGSSLQSNNAVQISQEPAKVVVPKEPNFTCPVCLNKLVEPSTTKCGHIFCAECIKQAIQFQKKCPTCRKALRKNNFHRIYLPNSDG

SEQ ID NO: 2661 - protein, 201 aa, Pachysandra terminalis
NGIFKKAKELSVLCDAKVSIIMVATNRKLHEYTSPHTTTKDLYDLYQKASGNSLWNSHYERMKDNLNKLKDINNKLRTEIRQRMGEDLNDLRLEELRGLEQNIQESLMIVGDRKEHQLRNQIGTYKKKSRNAEEINRKLLRRLDGIDDDSQYGLEDDGGDDESAIALTNGNSHIFAFRLQPNQPNLHINGGGYGFHNLHLA

SEQ ID NO: 2662 - protein, 328 aa, Hordeum vulgare
MCGGAILAQLIPPSAGRPSKQAAAGGRAPPTSSKKGGVSKSRHSSTPDADDDVFEAAFEDFDDHFDLRAEEDGGDDHVVFASKPAFSPRPAYDGGRAAHAASRKKRTGHLHGIRQRPWGKWAAEIRDPHKGTRVWLGTFDTADDAARAYDVAARRLRGSKAKVNFPDAARTGARPRRASRRTAQKPQCPPARTTAYSATAAARAQPEQDAMMVKPELMEFFNVDAIVHLTTAVAALPPVTASTFADTMPRVDEDSSVGSGGGAMLGFADELGFDPFMMFQLPCSDMYESADSIFAGDAVIPDALSVDSGMDAVSLWSFDEFPMDSAIF

SEQ ID NO: 2663 - protein, 234 aa, Papaver californicum
IENPTNRQVTYSKRRSGIFKKAKELTILCDAQVCLIMFSNTGKVCEYVSPSTTMKEFFDRFRRVTNIDLWASQYETLQEELKKQKEINSRLKKEIRQRTGQDDLNELTFEELRSLEANLLSSVEIVRLRKFHVLGSHTETSKKRNKAMEETHKNLLRATYSQADRDEEFLFYAIPADREGDHNRDYLSSSSSMRTLSINGGDCENSQITFQLQPSQPNLHHAAGGGYLYNQHYV

SEQ ID NO: 2664 - protein, 287 aa, Oryza sativa (indica cultivar-group)
TTTTSSPGAGSSSPWAAALNSIVGDVRRDQAAAHAAAAVGVGVGGEEMYQGRASTSPDSAAALSSASGKRERELERSGSGVDDDDGADGAGGRKKLRLSKDQAAVLEECFKTHSTLNPKQKVALANRLGLRPRQVEVWFQNRRARTKLKQTEVDCEYLKRWCERLADENKRLEKELADLRALKAAPSPASASAMQPSSSAAATLTMCPSCRRVATAGAPHQPNHQQCHPKSNITISSSSTAAAAVAVAGGNVLPSHCQFFPAAAAAADRTSQSTWNAAAPLVTRELF

SEQ ID NO: 2665 - protein, 197 aa, Cimicifuga racemosa
GGIMKKAKELHVLCDAEVSLIMFSNTGKMTDFISPNTTMKKMYDKYQQASGLNLWQSQYEKMQDNLNKLMEINRKLRREIGKRLGEDLNDLSFAELRGLEQHLESSCKIVRDRKFGLLGTQTETCRKKIKNLEEVHNNLLHEYEERLEEAYALANHEGMSTNELANDGSHVFMFRLQPSQPNLRDDGGYGIHDLRLG

SEQ ID NO: 2666 - protein, 197 aa, Zea mays
MRRAKPQQPSPSPEIRYRGVRRRPSGRYAAEIRDPAKKTPIWLGTFDSAEAAARAYDAAARSLRGPTARTNFPGAAASAPRHRARSASASAAAAAPAAVPATSSHSSTVESWSGGAPRVAAPPRSAAAPMEEDDDEDCHSYCGSSSSVLCEDARGDDDDDAAASHAPLPFDLNLPPPIDAAAEADQMGARYDTLLHL

SEQ ID NO: 2667 - protein, 256 aa, Solanum tuberosum
MDHHGNGQPPGIGVVTSSAPIYGAPYQANQMAGPPAVSAGAIQSPQAAGLSASSAQMAQHQLAYQHIHQQQQQQLQQQLQTFWANQYQEIEHVTDFKNHSLPLARIKKIMKADEDVRMISAEAPVVFARACEMFILELTLRAWNHTEENKRRTLQKNDIAAAITRTDIFDFLVDIVPREDLKDEVLATIPRGTLPVGGPTEGLPFYYGMPPQSAQPIGAPGMYMGKPVDQALYAQQPRPYMAQPIWPQQQQPPSDS

SEQ ID NO: 2668 - protein, 260 aa, Medicago truncatula
MVAFCPPQFSYSNMGWLLEELEPESLISHKEKNYASLEYSLPYHQFSSPKEHVEIERPPSPKLMAKKLNHNASERDRRKKINSLISSLRSLLPGEDQTKKMSIPVTISRVLKYIPDLQKQVQGLTKKKEELLSRISHRQEYAVNKESQRKKIPNYNSAFVVSTSRLNDTELVIHISSYEANKIPLSEILMCLENNGLLLLNSSSSKTFGGRLFYNLHFQVDKTQRYECDDLIQKLSSIYEKQQNNHLGTMDQTINSVLIY

SEQ ID NO: 2669 - protein, 199 aa, Triticum aestivum
MEPKSTTPPPPGPVLGAPVGYPPAAVYPAAPPPGYPHAPALYAPQPPPAAVAAASQQTAAQQQQQLQVFWAEQYREIEATTDFKNHNLPLARIKKIMKADEDVRMIAAEAPVVFARACEMFILELTHRGWAHAEENKRRTLQKSDIAAAIARTEVFDFLVDIVPRDEAKDAEAAVAAGMPHPAAGMPAADMGYYYVPQQ

SEQ ID NO: 2670 - protein, 203 aa, Brassica napus
  misc_feature (177)..(177): Xaa can be any naturally occurring amino acid
MGVPKHKWSQKEESALRSAVSKHGPGRWRTILKDPDFSQVLFLRSNVDLKDKWRNISVMGYGSGSRPKPVKRTLGSLPSDEEILEMVDAKKFSTTGSSALQVSSPRTPNWLDSLITEAICTMKQPCGSSKTAIGNYIQERYEVPPNFKQLLSSKLKYLSGFGSGKLIKVKRKYRIPXNSAALSSHKKRHLGTSSDKDEVSVQR

SEQ ID NO: 2671 - protein, 408 aa, Glycine max
MVSYATHHDTDTHHQQQPPQQPIKHGYLFSHQTKQQQSPLSDDDEPGFPADEDPKRKVSPWQRMKWTDTMVRLLIMAVYYIGDEAGSEGTDKKKSSGLIQKKGKWKSVSRAMMEKGFYVSPQQCEDKFNDLNKRYKRVNDILGKGTSCRVVENQSLLDSMDLSPKMKEEVRKLLNSKHLFFREMCAYHNSCGHNKQLWQYFQRATINRGSTTTSTSTAAVFALIRERGGESEMLKEDEDEDDDSEEFSDEDEAESGEGGSRGMEEDENDVMRRRARNKGGFGVSSSQMMQQLSGEVSGVLQDGGKSAWEKKQWMKKRVVQLEEQQVSYQMQAFELEKQRLKWARFSSKKEREMEKDKLQNERRRLEIERMVLLLRHKELELVNVQQQQHQQQIFYLGQKKLLCKFYVW

SEQ ID NO: 2672 - protein, 594 aa, Oryza sativa (indica cultivar-group)
MPAVKVEEEEEEERNPVASSPSVSEGSAHAAALASPTAADSIFGRRRKSGPVRRAKGGWTPEEDEKLRKAVDIYNGKNWKKIAESFSDRTEVQCLHRWQKVLDPELIKGPWTQEEDDVIINMVKKHGPKKWSVIARSLNGRIGKQCRERWHNHLDPQIRKEAWTVEEERVLARAHCMYGNKWAEIAKLLPGRTDNSIKNHWNSSLRKKIDDYNTRDILPVHPPVVGDGLKQLPKRPPADNHFDLNKEPIICSRDRLGVVHSDPTSHQRASNLKDFKGCADYLSLGQPVTSCEASAADDSAFDLATQGMRMDSVHDKGTGNNFVCGKVQGINFLGDKGLKINQISDKMGCSRQAKREGEAAINGGGSSLQSEAHSVGSLCYQIPKMEDIAPAQSPVFTANYVPEHSRNVMHSPNGYTTPPTHGKGSDQLSVESILRSAAEKFHGTPSILRRRKRDKPTPAEDNDLKIGRLSSDDFHTPIGKCTTDSPQSFKTAALLSLGPMDEQGSLDVSPPYRLRSKRLAVLKTVQNHLDFSSDEMSICDTTMKSACGNSDCANASSGVSSIQGKKLDEHMIGLETLTMNFAHTTKLDATQPNL

SEQ ID NO: 2673 - protein, 113 aa, Zea mays subsp. parviglumis
MGRTACCAKEGVKRGAWTSKEDDALAAYVKAHGEGKWREVPQKAGLRRCGKSCRLRWLNYLRPNIRRGNISYDEEDLIIRLHRLLGNRWSLIAGRLPGRTDNEIKNYWNSTLV

SEQ ID NO: 2674 - protein, 242 aa, Elaeis guineensis
MVRGKVELKRIENKINRQVTFAKRRNGLLKKAYELSVLCDAEVALIIFSNRGKLYEFCSSSSMMKTLERYQKCNYGAPETNIISRETQSSQQEYLKLKARAEALQRSQRNLLGEDLGPLSSKELEQLERQLDASLKQIRSTRTQYMLDQLADLQRKEQMLCEANKSLRRRLEESNQAGQQQVWDPTAHAVGYGRQPPQPQSDGFYQQIDSEPTLQIGYPPEQITIAAAPGPSVNTYMPGWLA

SEQ ID NO: 2675 - protein, 266 aa, Oryza sativa (indica cultivar-group)
PLFVSSAETGSANSEMCTRGFDVNTRPADGGAEAGRPSSPSSMQEASTRQQVADQEAADDEDNGGGGARKKLRLSKEQSSFLEDSFKEHSTLTPKQKSDLANRLNLRPRQVEVWFQNRRARTKLKQTEVDCEHLKRCCERLTRENRRLQREVAELRGALRTTTSSYPPLYGLHHLPAAAGTVFRVCPSCEHSKVVAAAASESFSPRVFAGGGAPAAITAAAAVPSPGAGSPPSSSAALFGARRPHFGPFAAAVIPPVLRRQPSATS

SEQ ID NO: 2676 - protein, 213 aa, Candida albicans SC5314
MTCLDELAHSLESKSGTTNSKTRNSKIKTIDLYQQNELSGQHSQDQDKFYRLPAMDPIARDKKPWKQDVNYFNKCYISSLALMKMCTHAQTGGSIEIMGMLVGKISGHSIIVMDTYRLPVEGTETRVNAQNEAYTYMVEYLTERQQLSNGKNEENIVGWYHRHPRYGCWLKGIDVSTQSLNQGLQDPYLAIVVDPVKTLKQGKVEIGAFRNVS

SEQ ID NO: 2677 - protein, 317 aa, Populus tremula x Populus alba
MERKEAVKVENFVGSPTFSSTTDHVQTSYPFMQGFDFVDDKSSLGFMELLGVQDFSPSLLDMIQVQIPSVQTPSAQVATEVVDSPPEVLNQPATPNSSSISSASSEGLNDEPANKGVDNEVEEQGKTKKELKPKKTNQKRQREPRFAFMTKSEVDHLEDGYRWRKYGQKAVKNSPFPRSYYRCTTASCNVKKRVERSFSDPSVVVTTYEGQHTHPSPVMPRPNFSGSTSDSGFSSTAAFAMPMQRRLSLYQQHQSQQQPPFPLVSLSPLGFGYNGNSTNAASYLQYEKRFYTSPGSALLKDHGLLQDLVPSHMLKEE

SEQ ID NO: 2678 - protein, 273 aa, Oryza sativa (japonica cultivar-group)
MGCKACQKPKVHYRKGLWSPEEDQKLRDFILRYGHGCWSAVPVKAGLQRNGKSCRLRWINYLRPGLKHGMFSREEEETVMNLHATMGNKWSQIARHLPGRTDNEVKNYWNSYLKKRVEGAEAAARKSAEPADVVTGSPNRSETGQERVAADRPASSESSGPVESSSADDSSSLTEPAAGLAAVRPHAPVIPKVMFADWFDMDYGTSLAGTAPGLSYQGSSSVQVDVPCGGAVDSLHGLGDGGFCWDFDDAADHMQGGGGLCDLLSMSEFLGIN

SEQ ID NO: 2679 - protein, 219 aa, Chloranthus spicatus
MGRGKIEIKRIENSTNRQVTFSKRRGGILKKAKELSVLCDAQVSLIMSSSTGKFYEYCSPATNTKKIFDRYQQASGINLWNSQYEKMQEYFEKLKETNNKLRKEIRQRRGEDLNGLNINELRSLEQNLDDSLKIIRERKYHVIKTQTETYGKKLKHRQEEHEKLLHRLEGIDMNQGYDMLDREGDYETAFGLANGGGHVFAFRLQPIQPNLHDNGYGTH

SEQ ID NO: 2680 - protein, 580 aa, Arabidopsis thaliana
MCSGPKSNLCSSRTLTEIESRQKEEETMLLLEFAACDDLDSFKREVEEKGLDLDESGLWYCRRVGSKKMGLEERTPLMVAAMYGSIKVLTFIVSTGKSDVNRACGEERVTPLHCAVAGCSVNMIEVINVLLDASALVNSVDANGNQPLDVFVRVSRFVASPRRKAVELLLRGGGVGGLIDEAVEEEIKIVSKYPADASLPDINEGVYGSDEFRMYSFKVKPCSRAYSHDWTECAFVHPGENARRRDPRKYPYTCVPCPEFRKGSCPKGDSCEYAHGVFESWLHPAQYKTRLCKDETGCARKVCFFAHKREEMRPVNASTGSAVAQSPFSSLEMMPGLSPLAYSSGVSTPPVSPMANGVPSSPRNGGSWQNRVNTLTPPALQLNGGSRLKSTLSARDIDMEMEMELRLRGFGNNVEETFGSYVSSPSRNSQMGQNMNQHYPSSPVRQPPSQHGFESSAAAAVAVMKARSTAFAKRSLSFKPATQAAPQSNLSDWGSPNGKLEWGMKGEELNKMRRSVSFGIHGNNNNNAARDYRDEPDVSWVNSLVKDSTVVSERSFGMNERVRIMSWAEQMYREKEQTVV

SEQ ID NO: 2681 - protein, 204 aa, Chloranthus spicatus
LCDAEVALIVFSNRGKLYEFCSSSSMLKTLERYQKCNYGAPDTTVSTREMQSSQQEYLKLKARVEALQRSQRNFLGEDLGPLSGKELEQLERQLDMSLKQIRSTRTQYMLDQLTDLQRREQMLCETNKALKRRLDEVTPANPHQGWDPNPHGVSYGRQAAQQQGDGFFHPLECEPTLQIGYQHDQITIAAPGPSVSNYMPGWLA

SEQ ID NO: 2682 - protein, 299 aa, Zea mays
MMRETYMDVLPPVDHIAARSNWFPAAARLWTAAENKQFERALAGLDLCRPDWEEVARAIPGRTVREVVSHFKHLEVDVQQIESGQVPLPAYGGGASSFTLQWDGYGPGPGDFRHGYRFAGGCGRRHHGRTPEQERKKGVPWTEEEHRLFLLGLKKYGKGDWRNISRNFVQTRTPTQVASHAQKYFIRLNSGGKDKRRSSIHDITTVNLTDDQPPSPSQSSLITSQSNAPAPAPGPAPAAGICQVPLAADAKRHGARTLPFSSPNRTSAAPAYRMEFHDQQGLQCGPLHDQLLASQSVLF

SEQ ID NO: 2683 - protein, 134 aa, Nicotiana benthamiana
CKRRNGLLKKAYELSVLCDAEVALIVFSSRGRLYEYANNSVKETIERYKKACSDSSNTDSISEANAQYYQQEASKLRAQIGNLQNKNRNMLGECLAALTLRDLKNLEQSIEKGISKIRSKKNELLFAEIEYMQG

SEQ ID NO: 2684 - protein, 248 aa, Anthurium andraeanum
MTAKAKRGAAVAAEARVAKKRVVKLNKGPWTAEEDQKLVEYVDAHGDRKWTSLPTKAGLNRCGKSCRLRWLNYLRPGIKRGNISEAEEDMIIRLHNLIGNRWSLIAGRLPGRTDNEIKNYWNTHLSKKPLTISDLNDKLNDDGGSRSDVDEPPSSGQSQGPLDSRRPAEPRISEASNEVAFNVDELVNLPAILDFDDLLDSGSCSDGIITSSQIFWTPNFSAHDQQDISDFDDLGMLMDIMDYVICPP

SEQ ID NO: 2685 - protein, 420 aa, Oryza sativa (japonica cultivar-group)
MVFDHGARVYVDPDAEVVALSPRTLLESDRYVCEICGQGFQREQNLQMHRRRHKVPWRLVKRPAAATAAEDGGAAGGGGGAGGGAGGGGARKRVFVCPEPSCLHHDPAHALGDLVGIKKHFRRKHGGRRQWVCARCAKGYAVQSDYKAHLKTCGTRGHSCDCGRVFSRKITRSLNLYSDIANYLRMKYIISLSNIAIKVESFIEHQDACNSGRVRGEVVPVATTLPVIRPAALRHHHHHPPPPPPELQLLPASTTAPLAAAFSSNSTTTGSSSHEQHATTMTTTKLQLSIGPAAVVAAASGGGGACAAAAGGEEEQQREEVRRALEEKTAADAARERAREEAAAAERALEDARRARHRARGELEKALALRDHAARLIAQVTCHACRQRSLAVMSMAAIDGHGASAVAREHLRGGGVGAGI

SEQ ID NO: 2686 - protein, 150 aa, Nicotiana benthamiana
REQTNRQVTYSKRRNGLFKKANELTVLCDAKVSIIMISSTGKLHEFISPSVTTKQLFDLYQKTVGVDLWNSHYEKMQEQLRKLKDVNRNLRREIRQRMGESLNDLNYEQLEELNENVDNSLKLIRERKYKVISNQIETYKKKVRKCGRNT

SEQ ID NO: 2687 - protein, 113 aa, Zea luxurians
  misc_feature (42)..(42): Xaa can be any naturally occurring amino acid
MGRRACCAKEGVKRGAWTTKEDDALAAYVKAHGEGKWREVPXKAGLRRCGKSCRLRWLNYLRPNIRRGNISYDEEDLIIRLHKLLGNRWSLIAGRLPGRTDNEIKNYWNSTLV

SEQ ID NO: 2688 - protein, 318 aa, Oryza sativa (japonica cultivar-group)
MASCRRGGGGDVDRIKGPWSPEEDEALQRLVGRHGARNWSLISKSIPGRSGKSCRLRWCNQLSPQVEHRPFTPEEDDTILRAHARFGNKWATIARLLAGRTDNAIKNHWNSTLKRKHHSSLLADDLRPLKRTTSDGHPTLSSAAAPGSPSGSDLSDSSHHSLPSQMPSSPPHLLLPQHVYRPVARAGGVVVPPPPPPPPPATSLSLSLSLPGLDHPHPDPSTPSEPAVQLQPPPPSQMPPPTPSCVRQEPPQMPFQLQPPPPPRPSAPFSAEFLAMMQEMIRIEVRNYMSGSAAVDPRSSPDNGVRAASRIMGMAKIE

SEQ ID NO: 2689 - protein, 235 aa, Arabidopsis lyrata subsp. petraea
  misc_feature (96)..(96): Xaa can be any naturally occurring amino acid
  misc_feature (144)..(145): Xaa can be any naturally occurring amino acid
MEEGRSSHDGESSKKIGRGKIEIKRIENTTNRQVTFCKRRNGLLKKAYELSVLCDAEVALVIFSTRGRLYEYANNSVRGTIERYKKACSDAVNPPXVTEANTQYYQQEASKLRRQIRDIQNSNRHIVGESLGSLNFKELKNLEXXLEKGISRVRSKKNELLVAEIEYMQKREMELQHNNMYLRAKIAEGARLNPEQQESSVIQGTTVYESGVSSHDQSQHHNRNYIPVNLLEPNQ

SEQ ID NO: 2690 - protein, 113 aa, Zea luxurians
  misc_feature (109)..(109): Xaa can be any naturally occurring amino acid
MGRRACCAKEGVKRGAWTTKEDDALAAYVKAHGEGKWREVPQKAGLRRCGKSCRLRWLNYLRPNIRRGNISYDEEDLIIRLHKLLGNRWSLIAGRLPGRTDNEIKNYWXSTLV

SEQ ID NO: 2691 - protein, 241 aa, Medicago truncatula
MGRGRVELKRIENKINRQVTFAKRRNGLLKKAYELSVLCDAEVALIIFSNRGKLYEFCSSSSMLKTLERYQKCNYGAPETNVSAREALELSSQQEYLKLKARYEALQRSQRNLMGEDLGPLSSKELESLERQLDSSLKQIRSTRTQFMLDQLSDLQRKEHMLSEANRSLRQRLEGYQLNQLQMNACVEEMGYGRHPSQTQGDGLYQQLECEPTLQIGYQPDPGSVCTAGPSMSNYMGGWLP

SEQ ID NO: 2692 - protein, 281 aa, Arabidopsis thaliana
MENPSSNLEKLQQDCYNEWMSLQAKRITELKEAISTGEKDDNKLLDLIRTAIRDFGDYARKRSEHSRRFSSNYFAPTWNTCLENALLWMGGCRPSSFIRLVYAMCGSQTEHRLTNFFNNTNHDIDSNLSMALGETRGGIGGGESMSDLTAEQLFKINELHLKTVEAENKLTKVSASLQEDTADTPIAVAAFYKEVIGQADVVVERALDKHEEDMGGLLVEADKLRMTTLTKIVDILTAVQAADFLLAGKKLHLAMHEWGKSREHRRLEASGGDSGGNVTRE

SEQ ID NO: 2693 - protein, 113 aa, Zea luxurians
MGRRACCAKEGVKRGAWTSKEDDALAAYVKAHGEGKWREVPQKAGLRRCGKSCRLRWLNYLRPNIRRGNISYDEEDLIIRLHRILGNRWSLIAGRLPGRTDNEIKNYWNSTLV

SEQ ID NO: 2694 - protein, 285 aa, Oryza sativa (japonica cultivar-group)
MGRGRIEIKRIENTTSRQVTFCKRRNGLLKKAYELSVLCDAEVALIVFSSRGRLYEYSNNNNYLKKDYSVLIFLVLCVKATIDRYKKAHACGSTSGAPLIEVNAQQYYQQESAKLRHQIQMLQNTNKHLVGDNVSNLSLKELKQLESRLEKGISKIRARKNELLASEINYMAKREIELQNDNMDLRTKIAEEEQQLQQVTVARSAAMELQAAAAAQQQQQNPFAVAAAQLDMKCFFPLNLFEAAAQVQAVAAQRQQIIPTELNLGYHHHLAIPGAAAADAPPPHF

SEQ ID NO: 2695 - protein, 253 aa, Physcomitrella patens
MVVPSLPAFGGQNAMLRRNIDNNTDTLISLLQGSCSPRVSMQQGYVAVPRSSESLENMMGACGQKLPYFSSFDGPSVEEQEDVDEGIDEFAHHVEKKRRLSLEQVRSLERNFEVENKLEPERKMQLAKELGLQPRQVAVWFQNRRARWKTKQLERDYETLKKAYDRLKADFEAVTLDTSALKAEVSRLKGISNDDVKPAEFVQGKCDTTSHPASPAQSERSDIVSSRNRTTPTIHVDPVAPEEAGAHLTIELG

SEQ ID NO: 2696 - protein, 288 aa, Oryza sativa (indica cultivar-group)
MVEARMPPGFRFHPRDDELVLDYLLHKLAAGGRGGGVYGGGGGVAIVDVDLNKCEPWDLPDAACVGGKEWYFFSLRDRKYATGHRTNRATRSGYWKATGKDRSITRRSSISSGEPSSSAAAAAVGMRKTLVFYRGRAPKGRKTEWVMHEFRLEPQPLHLKEDWVLCRVFYKTRQTIPSPSSEEAVTLPNELDLPATPSLPPLIDAYIAFDSAPTTTPSMVGSYEQVSCFSGLPALPMKGSISFGDLLAMDTSAEKKAIRVLHNSNTAKLELSPDWGQESGLSQMWNPQ

SEQ ID NO: 2697 - protein, 366 aa, Oryza sativa (japonica cultivar-group)
MASKAGGGGVARRGGGRMRSLGRQGSMYSLTLDEVQSQLGEPLHSMNLDELLRSVFPDGLAIADGAGATTSSQQHQPGSGLLRQGSITMPPELSKKTVDEVWKGIQAAPKRNAETGGGGGGGRRRRERQPTLGEVTLEDFLVKAGVVTQGSLKELSDVGNVDPVGRGVTATGTVDLAPGSHWIEQYKQQIASTDAHHHGQQGVQGAYFPNRLVPQPLNVGPGAILEPSYSDGQTSSGMIGGMSDSQTPGRKRGMSGDVADKLMERRQKRMIKNRESAARSRARKQAYTNELENKVSRLEEENVRLKRQKESDYLHYTRSNLVMENIEIHRSLINSNIIIWYDELYYFIGSVSSYNQEVFVMVIVCV

SEQ ID NO: 2698 - protein, 333 aa, Zea mays
MELALSLGETMADAGRDLMLGLGMGVGVRREEEAQRGRRDREVRRELEFTARSARSSPEPAVRLTLLHGLGLPWPPPPSSETNRHLEASARGFDVNRAPSLSAAGGAAEEDEEQDEAAAAAASSSPNNSASSFPTDFSAQGQVAPGADRACSRASDEDDGGSARKKLRLSKEQSAFLEDSFKEHATLNPKQKLALAKQLNLRPRQVEVWFQNRRARTKLKQTEVDCEYLKRCCETLTEENRRLQKELSELRALKTVHPFYMHLPATTLSMCPSCERVASNSAPAPASSPSPATGIAAPAPEQRPSSFAALFSSPLNRPLAAQAQPQPQAPANS

SEQ ID NO: 2699 - protein, 228 aa, Helianthus annuus
MKRDYPNQNHTLFPGSSSSTPPLLPDLTGKSKMWDEFNEQDAGDDELLAVLGYKVKSSDMVDVAQKIEHLEGVLSNDDGLSQMASDSVHQNPSDLSSWLESMICELNPVVQVQLPGSGSIAGVSLVGTSTSPGSAGVDDLQAIPGDAIYPPTKKQKSLSEDNGNKTYSPNPIVIIDSQENGIRLVHTLMACAEAVQQDDMKRAETLVKQAGYLAVSQAGAMRKVATYF

SEQ ID NO: 2700 - protein, 302 aa, Zea mays
MVAMAAVQQKQQQQRRDAEAELNLPPGFRFHPTDEELVAHYLCARAAGRRPPVSIIAEVDLYRFDPWDLPERALFGRREWYFFTPRDRKYPNGSRPNRAAGSGYWKATGADKPVEHGGRTAGIKKALVFYHGKPPRGVKTEWIMHEYRLAEAGGARAKKSGAGTLRLDDWVLCRLYNKKNEWEKMQQQKEKEKEKKAMESEASLSHSHSDTRTPESEIDDDPFPELGSLPAFDDMGAAPAPAGVVLPKEEVEDFGDLGGDDWLAGINLDDLQMPGDAADFYGSMLVSPMAAKMEPDGGFPFF

SEQ ID NO: 2701 - protein, 227 aa, Helianthus annuus
MKRDYPNQNHILFPGSSSSTPPLLPDLTGKSKMWDEFNEQDAGDDELLAVLGYKVKSSDMVDVAQKIEHLEGVLSNDDGLSQMASDSVHQNPSDLSSWLESMICELNPVVQVQLPGSGSIAGSLVGTSTSPGSAGVDDLQAIPGDAIYPPTKKQKSLSEDNGNKTYSPNPIVIIDSQENGIRLVHTLMACAEAVQQDDMKRAETLVKQAGYLAVSQAGAMRKVATYF

SEQ ID NO: 2702 - protein, 204 aa, Brassica napus
MKKLKLMDHSSCRRGYQDPPSKATARTLNNNNNNPKKKRVVKEDLDDDKIVSKHPTYRGVRMRQWGKWVSEIREPKKKSRIWLGTFSTAEMAARAHDVAALAIKGGSAHLNFPELVYQLPRPASADPKDIQAAAAAAAAAVAVDMEVETSTSSPVSSEPSSPATTTLADDAFSDLPDLLLDVNHNIDGFWDSFPYEEPFFSGTY

SEQ ID NO: 2703 - protein, 201 aa, Brachypodium sylvaticum
MDPTKSSTPPPPPVLGAPVGYPPGAYPPQPGAAAAAYAPQLYAPPPAAAAQQAAAAQQHLQMFWAEQYREIEATTDFKNHNLPLARIKKIMKADEDVRMIAAEAPVVFARACEMFILELAHRGWAHAEENKRRTLQKSDIAAAIARTEVFDFLVDIVPRDDAKDADAAAAAAAAAAAAGIPRPAAGVPATDPMAYYYVPQQ

SEQ ID NO: 2704 - protein, 227 aa, Helianthus annuus
MKRDYPNQNHTLFPGSSSSTPPLLPDLTGKSKMWDEFNEQDAGDDELLAVLGYKVKSSDMVDVAQKIEHLEGVLSNDDGLSQMASDSVHQNPSDLSSWLESMICELNPVVQVQLPGSGTIAGSLVGTSTSPGSAGVDDLQAIPGDAIYPPTKKQKSLSEDNGNKTYSPNPIVIIDSQENGIRLVHTLMACAEAVQQDDMKRAETLVKQAGYLAVSQAGAMRKVATYF

SEQ ID NO: 2705 - protein, 319 aa, Solanum demissum
MTTSSSDAPCVDHNQKSKNQDKKQQAKKPTTTKDRHTKVDGRGRRIRMPATCAARVFQLTRELGHKSDGETIEWLLQQAEPAVIAATGTGTIPANYSSLNISLRSSRHHSASNYLAHNNINNFGHVYHDRNYFNGVGLFSSENNSFFPSGNLNMLQAKEELCDDDDNDNDNNNNTGRIKRRSEDKDLQHNNYHMSNMLQSSTYGSIPASHQIGHIPATTLYMMTNNNNNTSHHDPNNCSMWASPSNSNIENSNIRGGLLNFMNFHQPILGTRGGGGGGTAAEGQWGMLTAAMNSYRQSGGHASGSSNQHNGGDDHQHHS

SEQ ID NO: 2706 - protein, 1820 aa, Helicobacter pylori
MNEENDKFETSKKTQQHSPQDLSNEEATEANHFEDSSKESKESSDHHLDNPTETKTNFDEYESEETQTQMDSGGNETSESSNGSLADKLFKKARKLVDNKKPFTQQKNLDEEIQEPNEEDDQENNGYQEETQMDLIDDETSKKTQQHSPQDLSNEEATEANHFEDSSKESKESSDHHLDNPTETKTNFDEYESEETQTQMDSGGNETSESSNGSLADKLFKKARKLVDNKKPFTQQKNLDEEIQEPNEEDDQENNGYQEETQMDLIDDETSKKTQQHSPQDLSNEETTEANHFEDSSKESKESSDHHLDNPTETKTNFDEYESEEITNDSNDQEIIKGSKKKYIIGGIVVAVLIVIILFSRSIFHYFIPLEDKSSRFSKDRNLYVNDEIQIRQEYNRLLKERNEKGNMIDKNLFFNDDPNRTLYNYLNIAEIEDKNPLRAFYECISNGGNYEECLKLIKDKKLQDQMKKTLEAYNDCIKNAKTEEERIKCLDLIKDENLKKSLLNQQKVQVALDCLKNAKTDEERNECLKLINDPEIREKFRKELGLQKELQEYKDCIKNAKTEAEKNECLKGLSKEAIERLKQQALDCLKNAKTDEERKECLKNIPQDLQKELLADMSVKAYKDCVSKARNEKEKKECEKLLTPEAKKLLEEEAKESVKAYLDCVSQAKTESEKKECEKLLTPEAKKLLEQQALDCLKSAKTEAEKKRCVKDLPKDLQKKVLAKESVKAYLDCVSQAKTEAEKQECEKLLTPEAKKLLEEAKESLKAYKDCVSRARNEKEKQECEKLLTPEAKKLLEEEAKESVKAYLDCVSQAKTEAEKQECEKLLTPEAKKLLEEAKESLKAYKDCVSRARNEKEKQECEKLLTPEAKKLLEQQALDCLKSAKTEAEKKRCVKDLPKDLQKKVLAKESVKAYLDCVSQAKTEAEKQECEKLLTPEAKKLLEEAKESLKAYKDCVSRARNEKEKQECEKLLTPEAKKLLEEAKESLKAYKDCVSRARNEKEKKECEKLLTPEAKKLLEQQALDCLKSAKTEAEKKRCVKDLPKDLQKKVLAKESVKAYLDCVSRARNEKEKQECEKLLTPEAKKLLEEAKESLKAYKDCLSQARNEEERRACEKLLTPEAKKLLEQEVKKSVKAYLDCVSRARNEKEKQECEKLLTPEARKFLAKQVLNCLEKARNEEERKACLKNIPKDLQKNVLAKESLKAYKDCLSQARNEEERRACEKLLTPEARKLLEQEVKKSVKAYLDCVSRARNEKEKQECEKLLTPEARKFLAKELQQKDKAIKDCLKNADPNDRAAIMKCLDGLSDEEKLKYLQEAREKAVLDCLKTARTDEEKRKCQNLYSDLIQEIQNKRTQSKQNQLSKTERLHQASECLDNLDDPTDQEAIEQCLEGLSDSERALILGIKRQADEVDLIYSDLRNRKTFDNMAAKGYPLLPMDFKNGGDIATINATNVDADKIASDNPIYASIEPDITKQYETEKTIKDKNLEAKLAKALGGNKKDDDKEKSKKSTAEAKVESNKIDKDVAETAKNISEIALKNKKEKNGEFVDENGNPIDDKKKTETQDETSPVKQAFIGKSDPTFVLAQYTPIEITLTSKVDATLTGIVSGVVAKDVWNMNGTMILLDKGTKVYGNYQSVKGGTPIMTRLMIVFTKAITPDGVIIPLANAQAAGMLGEAGVDGYVNNHFMKRIGFAVIASVVNSFLQTAPIIALDKLIGLGKGRSERTPEFNYALGQAINGSMQSSAQMSNQILGQLMNIPPSFYKNEGDSIKILTMDDIDFSGVYDVKITNKSVVDEIIKQSTKTLSREHEEITTSPKGGN

SEQ ID NO: 2707 - protein, 230 aa, Ostreococcus tauri
MATTPVDDAIDAALMGSSDWLNEFFSTFDGDVASALLDDVEAFEQPLVGDHEAEVGQVPRGESESGLESKKRKAVDEVENEVENASVGNGVRTSTLSEGAKKTKSTREKKRRDALNSRFEELQAVLEPGAATKADKATVVAAATVFIKRLRAEHARLAEGIMRLQEDNIQKAKLTKALAIEREALRKEKQILLHEKLRIEAQLQGFLANMPFASPADGFKCPPGRLPQHS

SEQ ID NO: 2708 - protein, 204 aa, Brassica napus
MKKLKLMDHSSCRRGYQDPPSKATARTLNNNNNNPKKKRVVKEDLDDDKIVSKHPTYRGVRMRQWGKWVSEIREPKKKSRIWLGTFSTAEMVARAHDVAALAIKGGSAHLNFPELAYQLPRPASADPKDIQAAAAAAAAAVAVDMEVETSTPSPVSSEPSSPATTALADDAFSDLPDLLLDVNHNIDGFWDSFPYEEPFFSGTY

SEQ ID NO: 2709 - protein, 190 aa, Brassica napus
MSTIHPVLSCEPGQTTHVPAFETGFTPWDNSHLFSVFDSSMNKITHSVHEYLSPDSVNRSGPDVVATDSYTDERRKKRKLSNRESAKRSRVKKQKHLEEMNIQLNQLKIENRELENQIRYVIQHFQRTETENNRLRLEQRLLHSTLLNIRQVWMLHQIDRSSDYVTWPYDENTRVTVQHDPSVITNHIIL

SEQ ID NO: 2710 - protein, 480 aa, Arabidopsis thaliana
MASNLWLLITFSSYSLLYLHLLPGAEGGGKYNCDYCQKDITGKIRIKCAVCPDFDLCIECMSVGAEITPHKCDHPYRVMGNLTFPLICPDWSADDEMLLLEGLEIYGLGNWAEVAEHVGTKSKEQCLEHYRNIYLNSPFFPLPEKRLFSQDMSHVAGKNRKELQAMAKGRIDDKKAEQNMKEEYPFSPPKVKVEDTQKESFVDRSFGGKKPVSTSVNNSLVELSNYNQKREEFDPEYDNDAEQLLAEMEFKENDTPEEHELKLRVLRIYSKRLDERKRRKEFIIERNLLYPNPFEKDLSQEEKVQCRRLDVFMRFHSKEEHDELLRNVVSEYRMVKRLKDLKEAQVAGCRSTAEAERYLGRKRKRENEEGMNRGKESGQFGQIAGEMGSRPPVQASSSYVNDLDLIGFTESQLLSESEKRLCSEVKLVPPVYLQMQQVMSHEIFKGNVTKKSDAYSLFKIDPTKVDRVYDMLVKKGIAQL

SEQ ID NO: 2711 - protein, 898 aa, Zea mays
  misc_feature (276)..(276): Xaa can be any naturally occurring amino acid
  misc_feature (280)..(280): Xaa can be any naturally occurring amino acid
MEAEAAAAVVASSASASASAGRSRPSSSAAQVTSNSAVRAGEENAASLYVLSVIDSLKKRITADRLTYIKNRIGENKTNISSYTQRTYNLSKNRQISTSKGTDSASNLLTKRQDDALCTLHSLDIIPVDKDGGTFQDESPFSSSNVMFGGNLGPKNAIIRPIKLPEVPKLPPYTTWIFLDRNQRMTEDQSVLGRRRIYYDTSCGEALICSDSEDEAIEDEEEKKEFKHSEDHIIRMTVQECGMSDAVLQTLARHMERAADDIKARTCVLMDISAHXDADXVFDCKLHGCSQDLVFPTEKQPAWSGVDDSVPCGIHCHKLASEPDAAAGADHMLFDVEEPTHSSDNVMNQPGSNRKKNGSSGRKTKSQQSESSSTARVISESSDSEVHPISNKSPQHSPSPSKVKIGPKGGIRKITNRRIAERILMSVKKGQREMASSDSNFVSGYLLARDMKLRSDTRNGNKELIVSSQQSSPSTRSSKKKSTPQIGNSSAFAEAHNDSTEEANNRHSATDGYDSSRKEEFVNENLCKQEVYLRSWKAIEQGLLVKGLEIFGRNSCLIARNLLGGMKTCKDVFQYMNYIENNSASGALSGVDSLVKGYIKGTELRTRSRYFRRRGKVRRLKYTWKSAGYNFKRITERKDQPCRQYNPCGCQSTCGKQCPCLSNGTCCEKYCGCPKICKNRFRGCHCAKSQCRSRQCPCFAADRECDPDVCRNCWVGCGDGTLGVPNQRGDNYECRNMKLLLKQQQRVLLGRSDVSGWGAFLKNSVSKHEYLGEYTGELISHKEADKRGKIYDRENSSFLFNLNNEYVLDAYRMGDKLKFANHAPDPNCYAKVIMVTGDHRVGIFAKERILAGEELFYDYRYEPDRAPAWARKPEASGAKDDGQPFNGRAKKLAQNNRG

SEQ ID NO: 2712 - protein, 687 aa, Brachypodium sylvaticum
MAGTSDRGSIMEDWMAMPPTPSPRTLMSSFLNEDFSSGPFSNLFSENGSNKPHDHSEKRGEFVDLRDQVPAQSAEATLQKDISLEPNLFNANQKPNPHGGLAERMASRAGFSIPKIDTSRVGSSTVIRSPIAIPPGLSPTTLLESPVFLYNSMAQPSPTTGKLPFPATNANSTIPPAARMNEDHTFSNDVFSFQPHLGSKAPSFSTVEKGYNACPSNQSLSNIHQRESSLQLSFTAVKDTADETIVKPKTSDSMFGDDHSYSEEQEDDETDQNGEYSSATISTPDEDGYNWKKYGPKQVKSTEYPRSYFKCTHPNCPVKKKVERSQVGQITEIIHKGTHNHPLPPLNPHSGVPLSHISDPQVNARKNPGLQAGLNSASLWENGKSGCIQDVQSEGVDARPATRLPVSAYGDTSIVESQDAVDVSSTLSNEEIDRATHGTVSLDCDGGEDETESKRSTITAAAATTSTTSTIDMVTAASRSVREPRVVVQTTSEVDILDDGYRWRKYGQKVVKGNPNPRSYYKCTHPGCSVRKHVERASHDLKSVITTYEGKHNHEVPAARNSGHASSGSGSAPASVPQVNLSHRWQEQAQGSFGQFGGSTPFGSFGLPPRGHLGAAGNFRFGMVPPGMSIPMPAAHQQSMMQGYPGLMMPEGQPKTEPGPQSGFPEANAASSAYQQMMSRPPFGSQM

SEQ ID NO: 2713 - protein, 260 aa, Triticum aestivum
MSSAGSARVPKRRRTTKTSEAADRQLRERQFLDLNLFPAVEVASTGGSLSINEPVSRTQPPPTAAALLYETTQVVVSSAAAGSNIGMNSFPINVEVIDDDVAIYTSGPPPQARQQSSRTGPITVIIDDDSETTAGPAGEALDEHVNTLLSLGMNPRHNPSRAQPNTDLVINIVDTPETNNIPPKVVQAVPEPVKEIPKETKFSCPVCMNELVNASSTICGHIFCQKCIKASIQAQKKCPTCRRKLTMSNFHRVYLPTADN

SEQ ID NO: 2714 - protein, 252 aa, Zea mays
MASPEGTTWVFDCPLMDDLAVAADFAAAPAGGFFWAAPPSLQPQAPVQSVVAASAPNPCMEISSSVDCGQEKEQPTNKRPRSESTTESSTKASREKIRRDKLNERFLELGAILEPGKTPKMDKTAILSDAIRVVGELRSEAKKLKDSNENLQEKIKELKAEKNELRDEKQRLKAEKESLEQQIKFLNARPSLVPHHPVIPASAFPAPQGPAAAARHKLMMPVIGYPGFPMWQFMPPSDVDTSDDPRSCPPVA

SEQ ID NO: 2715 - protein, 246 aa, Brassica napus
MLKSVNPMTFYGIGEQQFPTLGYIVSKPGNAGAYEIDPPLPTVNDVIYSSDEFRMYAYKIKRCPRTRSHDWTECPYAHRGEKATRRDPRRYSYCAVACPAFRNGACHRGDTCEFAHGVFEYWLHPARYRTRACNAGNMCQRKVCFFAHAPEQLRQSEGKHRCRYAYRPVRTTVARGRNGDGVGIREDGEDFDTWQSPVKSGESELDINEERLLKCWSGMSIVDDHYDPSDLDLNLSHIDWISALVD

SEQ ID NO: 2716 - protein, 615 aa, Zea mays
MALKASSSDNRTRSTVSLCIVIGMCCFFYILGAWQKSGFGKGDSIALEVTKRTDCTVVPNLSFDTHHSKASGNSSSLVSPSKKFKPCPDLYTDYTPCQDQNRAMKFPRENMNYRERHCPAQKEKLHCLVPPPKGYVAPFPWPKSRDYVPFANCPYKSLTVEKAIQNWVQYEGNVFRFPGGGTQFPQGADKYIDQLASVVPIANGTVRTALDTGCGVASWGAYLLKRNVLAMSFAPRDSHEAQVQFTLERGVPAVIGVLGTIKLPYPSRAFDMAHCSRCLIPWGANDGMYMMEVDRVLRPGGYWVLSGPPINWKVNYKGWQRTKKDLEAEQNRIEEIADLLCWEKVSEKGEMAIWRKRVNTESCPSRQEESAVQMCESTNPDDVWYKKMKACVTPLPDVKDENDVAGGAIKPFPARLNAVPPRIANGLVPGVSSQAFQKDNKMWKKHVKSYSSVNKYLLTGRYRNIMDMNAQYGGFAAAIESPKSWVMNVVPTIAKMPTLGAVYERGLIGIYHDWCEAFSTYPRTYDLIHASGLFTLYKTKCSMEDVLLEMDRILRPEGAVIIRDDVDVLTKVNSLALGMRWDTKMVDHEDGPLVREKILYAVKQYWVGGKQTAVA

SEQ ID NO: 2717 - protein, 408 aa, Oryza sativa (japonica cultivar-group)
MASEDGCGGGNPPGDAAAAPPVWNAAPAAGAGCGDLEEDLRFQCCVCLELLYKPVVIACGHMSCFWCVHNAMHIIRESHCAVCRQPYKHFPSICQLLHHLLIKLEPVEYKRREKEVLEDEKRVDTYSPQIIEFLNSKSNNCEIDGENRPEESNSRPPQEVTSDGNTINGHPKKVKLEDVSCALCKELLYQPAVLNCGHVYCMSCLSSLDDGALKCQVCGGLHPGDFPNVCLDLDHFIEDYFPAEYDLRREKIKLLKGECNQGSSSGTSCIKEGRGRPTNKENRAHQDDDLSDVHIGVGCDSCGMYPIRGKRYKCKDCTELIGFDLCEECYNTKSKLPGRFNQHHTPDHRMELDHSALFNRLMRLQGIHEEGPGEIIIEGAFVAPDAVVHIIADDHEEIEDNGEDDHLL

SEQ ID NO: 2718 - protein, 455 aa, Saccharomyces cerevisiae
MNNNDRKSIKTAGGSMSLSNKTVKELRQLLKERYTVEDELTESIALSSMRFKPSQEPEFHALSQSSLLKTKLKQQSSTDIPSYTHVLISKLSCEKITHYAVRGGNIEIMGILMGFTLKDNIVVMDCFNLPVVGTETRVNAQLESYEYMVQYIDEMYNHNDGGDGRDYKGAKLNVVGWFHSHPGYDCWLSNIDIQTQDLNQRFQDPYVAIVVDPLKSLEDKILRMGAFRTIESKSDDNSATSYYELETIIFDSELNRALFETKLNLHCVIEDDESEQISLNRLIDSMKQYSYLMDSKNVRTRIKLATTSERVSNENKKNIDYQNRSTRSQFCLNTQRGDSTETSSFGSMFSGDNTSDVDMEDRNLTEFDSTDTSLCINGEPSIHVNRVERSSRSTDNFHNSKKRMNSNQERCHDEGNDMLQRNVLETDYARAKNRILASKIKQYERLRFYKDTFTL

SEQ ID NO: 2719 - protein, 444 aa, Zea mays
VLQASEAMDMNESGEKGMEGNASSGIPVDWQTQFSAAAFSCAPPPNHEQQQVPMMDSAFASAGLWASTSQAMALSDAGGRSAARAGFLAPVPGFLPQGLAHFPVDSGFIERAARASCFGGGGGGGVMAAFGAAADHQPMNSAFSGSSEALLDHQRTKDGSDKGEPELGRNGHDGVLSSEAAAAGDCSSKGTSDSKKRRRPNEVMGGDQVQSSNLPADSANESVHSKDKGEESSLATTTTGPGKSKGKGARETSESQKEDYIHVRARRGQATNSHSLAERLRREKISERMKLLQDLVPGCSKVTGKAVMLDEIINYVQSLQRQVEFLSMKLATVNPRLDLNIEGLLSKDLLRFPGVPSSSLGFSPEMMHPQLQLSQPGLIQGGAAGMANPDVFRRIMQAQLSAKDGSQMPPHALNGAFSDVAQQQMAYPSSQDLSIGPSQDGFQM

SEQ ID NO: 2720 - protein, 828 aa, Solanum demissum
MSMLRWMCGHTRSDKIRNEVIREKVGVASVVDKLREARLRWFGHVKRRSADAAVRRCEVMVVEGTRRGRGRPKKYWEEVIRQDLAMLHITEDMTLDRKEWRSRIKLRVSRKQPLYLHEVVARAAMAAKNSGDNRTRTSVSIFIIAGLCCFFYLLGAWQRSGFGKGDSIAVAITKTAGENCDILPNLNFETRHAGEAGGTDESEEVEELKPCDPQYTDYTPCQDQKRAMTFPRENMNYRERHCPPQEEKLHCLIPAPKGYVTPFPWPKSRDYVPYANAPYKSLTVEKAIQNWVQYEGNVFRFPGGGTQFPQGADKYIDQLASVVPIENGTVRTALDTGCGVASWGAYLWKRNVIAMSFAPRDSHEAQVQFALERGVPAVIGVLGTIKMPYPSKAFDMAHCSRCLIPWGAAGMYLMLISRKMLTEFLDLEATGCFLDLLSTGRSILRPGNAPRRILRKNKGRLKRLLNFFAGRRYLKRERLPFGRKERIVPHAVLHKKILQPDSIVCVGGSQIFSWENEKHVKKVQYANLNCLGSRKFTKYAGQSICHNLIRYNKMEMCITPNNGNGGDESLKPFPERLYAVPPRIANGLVSGVSVAKYQEDSKKWKKHVSAYKKINKLLDTGRYRNIMDMNAGLGGFAAALHNPKFWVMNVMPTIAEKNTLGVIFERGLIGIYHDCYSENDFLETKGLSKTVFLPHKGLNTPHPPHTPPALDHMIETLLSPGSMCFLYMLPAGAKIKTSTQIKSLIALWHCSSFIENILLEMDRILRPEGAVILRDNVDVLIKVKKIIGGMRWNFKLMDHEDGPLVPEKILVAVKQYWTLGDTNSTSSQ

SEQ ID NO: 2721 - protein, 306 aa, Oryza sativa
MGAPKQKWTSEEEEALRRGVLKHGPGKWRTIQKDPEFSPVLSSRSNIDLKDKWRNLSFSASGLGSRDKLKVPRIKGPSSSTSPSSQTPLLVLPPNKVAEASPSADPEKSSQDVKIPKYSSMVIEALCEIGDPNGSDVDAICHYIEQRHEVQANFRRLLTAKLRRLIAAKKIEKIDRSYRITESYAAKVSQANKSPSPKKDPAKPLKASQNLGSFAGTSPALEAAAAAAMKVADAEAKSHLANEHMTEAERIFKLAEETESLVTLATEIYERCSRGEILTIMQVAQSNFEFQSVSGNGSGTGSTVLA

SEQ ID NO: 2722 - protein, 150 aa, Brassica napus
MREDDTDWFTRWEQELPSPEELIPLSQSLISPDLALAFDIRLPNNSGQPHHHHHHHHSTPPPQLPSSQANSSAEFAADSADLGSGATAGAGDEPARTLKRPRLVWTPQLHKRFVDAVAHLGIKNAVPKTIMQLMSVDGLTRENVASHLQK

SEQ ID NO: 2723 - protein, 166 aa, Oryza sativa (japonica cultivar-group)
MDAHGQEEEEEPMQVQQQQAFRGVRKRPWGKFAAEIRDSTRNGVRVWLGTFDSAEEAALAYDQAAFAMRGSAAVLNFPMEQVRRSMDMSLLQEGASPVVALKRRHSMRAAAAGRRRKSAAPAPADQEGGGGVMELEDLGPDYLEELLAASQPIDITCCTSPSHHSI

SEQ ID NO: 2724 - protein, 277 aa, Triticum aestivum
SAFHFHRGGGWPPTTAARATRRRRRRRPPPPPPVELASTIWRTRGSSAAYAWSFSINQLLLHVVICHVSGASIKLCIKLEPVEYKKREMEVLEQERSVDTFSPQIIEFLNSKNNNGENGKDWGNKLEDGKTGPPGEASVDDSTMNEHSMKIKDDVSSPICKELLYQPALNCGHVYCISCLPSVGDEALKCQVCGGLHPGDFPNVCLDLDHFLEEYFPAEYESRRKKLQLENSQCNPEGSSSSTSCKKGTFVQKTLDLSNVHIGVGCDSCGVCSSCTN

SEQ ID NO: 2725 - protein, 196 aa, Amborella trichopoda
GGIIKKAKELTVLCDAEVSLIMFSSTGKFSEYCSPSTSTKKIYDRYQQVSETNLWDTHYEKMQRDLGNLKEESNRLRKLIRQKMGEDINELKYKELRDLEQNLEEWVKRIRDKKNHLVTNQTETCKKRIKNLEEQNKMMRHMMEEDEAERGLEDDGDYESQLALGVRNTHLFAYRMRPAEGNIHDRGYGLNDLRLG

SEQ ID NO: 2726 - protein, 289 aa, Glycine max
  misc_feature (172)..(172): Xaa can be any naturally occurring amino acid
MAFFPANFMLQTPHQDDHQPPPSLNSIITSCAPQEYHGGGASFLGKRSMSFSGIELGEEANAEEDSDDGSQAGEKKRRLNMEQVKTLEKSFELGNKLEPERKMQLARALGLQPRQIAIWFQNRRARWKTKQLEKDYDLLKRQYEAIKADNDALQFQNQKLQTEVSNFLPTSXILALKSREPTESINLNKETEGSSSNRSENSSEIKLDISRTPAIDSPLSTQQNNNNRTLFPSSARPTGVAQLFQTTPRPEIQCQKIDHMVKEESLSNMFCAIDDQSGLWPWLEQQHFN

SEQ ID NO: 2727 - protein, 161 aa, Solanum lycopersicum
MVPTPQSDLPLNENDSQEMVLYEVLNEANALNIPYLPQRNQLLPRNNILRPLQCIGKKYRGVRRRPWGKYAAEIRDSARHGARVWLGTFETAEEAALAYDRAAFRMRGAKALLNFPSEIVNASVSVDKLSLCSNSYTTNNNSDSSLNEVSSGTNDVFESRC

SEQ ID NO: 2728 - protein, 179 aa, Brassica napus
  misc_feature (158)..(158): Xaa can be any naturally occurring amino acid
MGRRKIKMEKVQDTNTKQVTFSKRRLGLFKKAGELATLCNAEVGIMVFSPGNKPYPYGSPSFELVAERYNNESEDSDSCETSGNGRGNRARQEKRICKRLNSIMEQVEAEKKRGEDFEHQLETAGGEERFDKPIEELSLEELEEYEGKMMDMLDNIQXNISGMEVSSTLVIMSKDTQNK

SEQ ID NO: 2729 - protein, 250 aa, Glycine max
EKVKGCNFFLTNLTTFCNVFSGSVWFSGSSWNSKKIPTLKMGRGGTAAAAVEIAEPGSRPVFFKEPRYRGVRKRPWGRFAAEIRDPLKKARVWLGTFDTAEEAARAYDTAARTLRGPKAKTNFPLSPPFYHPDPFSDHRHFANTGEDFHDHRRPTSSGMSSTVESFSGPRAAVPATAPVATGRRYPRTPPVIPEDCRSDCDSSSSVVDDGEGDNVASSFPREPLPFDLNALPLDDADVATDDLFCTVLCL

SEQ ID NO: 2730 - protein, 341 aa, Arabidopsis thaliana
MEGGGRGPNQTILSEIEHMPEAPRQRISHHRRARSETFFSGESIDDLLLFDPSDIDFSSLDFLNAPPPPQQSQQQPQASPMSVDSEETSSNGVVPPNSLPPKPEARFGRHVRSFSVDSDFFDDLGVTEEKFLATSSGEKKKGNHHHSRSNSMDGEMSSASFNIESILASVSGKDSGKKNMGMGGDRLAELALLDPKRAKRILANRQSAARSKERKIRYTGELERKVQTLQNEATTLSAQVTMLQRGTSELNTENKHLKMRLQALEQQAELRDALNEALRDELNRLKVVAGEIPQGNGNSYNRAQFSSQQSAMNQFGNKKNQQMSTNGQPSLPSYMDFTKRG

SEQ ID NO: 2731 - protein, 214 aa, Glycine max
  misc_feature (188)..(188): Xaa can be any naturally occurring amino acid
  misc_feature (202)..(202): Xaa can be any naturally occurring amino acid
  misc_feature (205)..(205): Xaa can be any naturally occurring amino acid
MKDMAEVVKSEECCQENKQSTAASCSSVSEGSGSAIHKSPAICSPASTSPSHRRTTGPIRRAKGGWTAQEDETLRNAVAVFKGKSWKKIAEFFPDRSEVQCLHRWQKVLNPELVKGPWTQEEDDKIVELVSKYGPTKWSLIAKSLPGRIGKQCRERWHNHLNPDIKKDAWTLEEELSLMNAHRIHGNXWGSIANVLHGKTDXCIXNHWNSSLKK

SEQ ID NO: 2732 - protein, 246 aa, Arabidopsis thaliana
MEDGASNEVAESSKKIGRGKIEIKRIENTTNRQVTFCKRRNGLLKKAYELSVLCDAEVALVIFSTRGRLYEYANNSVRGTIERYKKACSDAVNPPTITEANTQYYQQEASKLRRQIRDIQNLNRHILGESLGSLNFKELKNLESRLEKGISRVRSKKHEMLVAEIEYMQKREIELQNDNMYLRSKITERTGLQQQESSVIHQGTVYESGVTSSHQSGQYNRNYIAVNLLEPNQNSSNQDQPPLQLV

SEQ ID NO: 2733 - protein, 214 aa, Elaeis guineensis
MVRGKTEMKLIENATSRQVTFSKRRNGLLKKAFELSVLCDAEVAVIVFSPRGKLYEFSSTSMEKTIDRYRRHAKSGINNNEVTQQWKFEAASMSRKIESLEVSKRKLLGENLESCSAEELHEIEGKIEQSLCHVRGKKNQLLEEQIATLKEQEQTLMEENALLREKCKLQSQLRPAAAPEETVPCSQDGENMEVETELYIGWPGRGRTNCRSQG

SEQ ID NO: 2734 - protein, 226 aa, Arabidopsis thaliana
MSSLTTISGGAMEESQEVEELVDTRLSLVIGAASRPPPTVLALLPAASPENEAAARGKRKGVKGPENGAGGAAAASREHSKRSKTVHDSSDVDDDDRGDAAGGDGTRKKLRLTVEQAALLEESFRAHNVLSHGEKHDLARQLGLKPRQVEVWFQNRRARTKLKQTELDCELLRRWCERLSDDNARLRRELAETLSSSPAFLSRLTMANDKAVCSSCNKLTSARMPG

SEQ ID NO: 2735 - protein, 139 aa, Brassica rapa subsp. pekinensis
MRKGRGSSAVPPALHGSVKEPRYRGVRKRPWGRFAAEIRDPLKKSRVWLGTFDSAVEAARAYGAAARNLRGSKAKTNFPIDCSPSSPLQPPNYQNHHRNLAPNQNQMDPFMDHRLYGGGGGSFPEQQQVISRPASSSLS

SEQ ID NO: 2736 - protein, 183 aa, Nuphar variegata
AGIIKKAKELTVLCDAHVSLILFSSTNKLFEYCSPTTTTKKIIDRYQQVTAINLWDSHYESMQKEFNKLKEKNERLRRSIRQRNGEDLDMLNHSELCGLEQNLSEALKKIRSVLDNKIKRQIDTYRKKIKAADSIRNIGFMELQELNCSFDGSEENYESMLVMRNGNAQPFPISVQPNHPNLH

SEQ ID NO: 2737 - protein, 338 aa, Triticum aestivum
MGSRKMASQPGRGAGAGDDAGTSQRGQVQSLARQGSLYSLTLDEVQNHLGEPLQSMNLDELLRTVFPDDMEPDGATTSQYVPSSSLLRQGSITMPTELSKKTVDEVWKGIQETPKRSVQGSGRRKRERQPTLGEMTLEDFLVQAGVVTQGFLKDTSDAGNLGLVGREATAAGAADLTSGAQWLGHYQQQIAAAAIDTHQHGQQIVPAAYMPIQFVPQPLNVVGPGATLGSAYSDGQSTSPMISPISDSQTPGRKRGVSGDVPNKFVERRQKRMIKNRESAARSRARKQAYTNELENKVSRLEEENERLKKQKELNMMLCSVPLPEPKYQLRRTCSAAF

SEQ ID NO: 2738 - protein, 365 aa, Triticum aestivum
  misc_feature (112)..(112): Xaa can be any naturally occurring amino acid
  misc_feature (170)..(170): Xaa can be any naturally occurring amino acid
MEPTSSSAVARQTWELENNIPAAASDPDAMDAIYHYDEAANARAHQEKPWATDPHHFRRARISALALLKMVVHARAGGTIEIMGLMQGKFEGDSIIVMDAFALPVEGTEDQXLNAQADAYEYMVEYSTINKQAGRLENVVGWYHSHPGYGCWLSGIDVSTQMLNQQFQEXWLAVVIDPTRTVSAGKVDIGAFRTYPKDYKPPDEPVSEYQTIPLNKIEDFGVHCKQYYSLDITYFKSSLDSHLLDLLWNKYWVNTLSSSPLLGNRDYIAGQIFDLADKLEQAEGQLAHSRFGMLMPSQRKKEQEESPLAKVTRDSSKITAEQVHGLMSQVIKDILFNSVHPSSKSKASASGTAPDSPVPEPMVEA

SEQ ID NO: 2739 - protein, 196 aa, Nuphar variegata
AGIIKKAKELTILCDAHVSLVLFSSTHKFFEYCSPTTTMKKMIDRYQQVTGTNLWDSHYESMQKEFNKLKEKNERLRKSIRQRVGDELDELNHAELCGLEQNLSEALKKIRLALDSKIKRQIDTYKKKIRSAESNRNKVFRDAQEELNCTFEESEEDYESMLVMRNGNPQLFPIRVQPTHPNLHERGFGCHDLRLG

SEQ ID NO: 2740 - protein, 235 aa, Matricaria chamomilla
MIRNNAFDSDFALLESVRRHLLDDNAPPMSCRSNNFLFPHLSDSWGELPLQQNDSEDMLIAKFLNEALPLQQNDSEGIITPEMTSSSENIFFVKSEPETSSFQPKSLGSQKGKHYRGVRRRPWGKYAAEIRDPAKNGARVWLGTYETAEDAAVAYDMAAYRMRGSRALLNFPLRINSGEPEPVRITSKRKTTSPSEGLVVKKVKVELEMSTQAEFPLVYGCYYCVILGPFLVKCF

SEQ ID NO: 2741 - protein, 194 aa, Illicium parvifolium
  misc_feature (45)..(45): Xaa can be any naturally occurring amino acid
  misc_feature (77)..(77): Xaa can be any naturally occurring amino acid
GGILKKARELTVLCDAQVSLIMFSSTGKFSEYCSPSATTKKIFDXYQHVSGINLWNSHYQKMQVELNKLKEENNKLXRKIRQRVGGDLDGLNEKELRGLEQNLVDCAKIVRDRKYHVINNESETFRKKIRNLEERHKELLSAMEGNPPSYLFEDNGAESTGDLGSRNSSLMFAFRVQPSQPNLHDVVYSTHELR

SEQ ID NO: 2742 - protein, 280 aa, Matricaria chamomilla
MEYISSSNKNIWIGELIKGRDSTKKLQNLLPRKIYNDGVLANDLVVKILGSFSNTLSTLSSLGPGELSPVISPCCNDRALDSDEIEKKPKDRRGCYKRRKTEDSRIKIVDTIEDEFAWRKYGQKEILNAKFPRCYFRCTHKSEGCKALKQVQQLEDGSEKFHVTYLGYHTCQNIHKDTQMFSDTSALKFYLNFKDPNINYSSPSSHSTITNANITHSSEREDDSNAQSDAHHLATSNDDKQSIALWKDIIGNLESPHEDIFKNGISVDDFKFDENVFLHI

SEQ ID NO: 2743 - protein, 200 aa, Persea americana
GGILKKARELTVLCDAEVSLIMFSGTGKFSEYCSPTTSTKKIFDRYQQVSGINLWNSHYEKMQNHLNKLKDDNNKLRREIRQRMGEDLNDLEIGELRGLEQNLDNSLKIVRERKYHVINTQTETYKKKLRSLHESHANLVRALEGKDDNGDCALGDNGGPDYETALGWANGGSQMFAFCIQPCQPNLQETSYGSHDLRLA

SEQ ID NO: 2744 - protein, 187 aa, Asimina longifolia
AGITKKAKELTVLCDAEVCLIMFSGTGKFSEYCSPSTTTKKTFDRYQQVSGINLWESHYEKMQTHLIKLKEDNSRLRREIRQRIGEDLDDLELEQLRGLEQNIESSVKAVRERKYHVISTQTETYKKKIRNLHEAHANLIRQLEGLADNSGYGLVDDGADYEAVLALANGTHNLHDAGFGIHDLRLA

SEQ ID NO: 2745 - protein, 197 aa, Zea mays
  misc_feature (7)..(7): Xaa can be any naturally occurring amino acid
  misc_feature (78)..(79): Xaa can be any naturally occurring amino acid
  misc_feature (133)..(133): Xaa can be any naturally occurring amino acid
  misc_feature (149)..(149): Xaa can be any naturally occurring amino acid
WTALEAXDPVEDFLLGGAGAGDDGDLVAVFCDDGGLGIEGIHGDACGFEQSNLGKRGRDEPCSSGPTSKACREKMRRXXLNDRFLEFSSVMSPGREAKLDKANILSDAARMGAPLRGEAEKLRESNEKAAGEXIRDLEGEKNQLREEKXELKVEKGWLGPQAQPLGVPPTGMDPFPPSRFKTPGGGHPLGAPPPTKG

SEQ ID NO: 2746 - protein, 211 aa, Triticum aestivum
ARGAKSPTPTSKIESYLQFADKGFEDANIPFGPVEASHPLALTTADAVATNGVNPWNWRDTSTNGGDNQGTYGGRVILVKWGDYTKRIGIDGTAEAIKEAIKSAFGLRTRRAFWLEDEDEVVRSLDRDMPVGVYALHLDNGITIKLCTFEDADRMTVRTEDKTFYTEDDFRDFLSRRGWTLLREYSGYRVADTLDDLRPGAIYQGMRSLVD

SEQ ID NO: 2747 - protein, 206 aa, Triticum aestivum
KESRHPLHIAAAMATANQDCAATQFHDHRGGTAATELHGRTISSEQEHGIIVAALRHVVFGYTTAPPEVVEAVACGRCGIDGCLGCDFFGATEPEAEAAAVPVGGVQMNRPTKKEEDAYRGERQRPRKKRAAEIRDPRRAVRKWLGTFDTAEDAARTYDLAALEFRGPRARLNFPCSDETLRGHGSAHGADDEAGTSPQNETLTPP

SEQ ID NO: 2748 - protein, 197 aa, Trollius laxus
TGIIKKATELAVLCDAEVSLIMFSSTGKLSEFTSPNTTTKKLFDQYQRVSGTPLWDTHYERMQESLKQQKEANMKLRKQIRQRIGEGSLDNLSFEELRNLEQDLDTSVKVVRDRKYHMIATQTETHRKKLRNMQETHTHLVRELEARGEDPYYEGDYESSYIGMANGGAHLLSYRLQPNHPNLQDGEGYGSYNLRLA

SEQ ID NO: 2749 - protein, 253 aa, Zea mays
MSLPPGPADSGTGTGDDWFLDCGILDDLPAAACGAFPWDASPSSSNPSVEVGSYVNANDAFKEPNDVFKEPGSSKRLRSGSSDMPTSKACRERMRRNKLNDRFLELGSALEPGKPVKADKAAILSDATRMVIQLRSESQQLKETNGSLEEKIKELKAEKDELRDEKQKLKLEKESLEHQMKLMASAPAYMPHPTLMPAPFAQAPLTPFHAQGQAAGQKLMMPFVGYPGYPMWQFMPPSEVDTSKDSEACPPVA

SEQ ID NO: 2750 - protein, 227 aa, Plantago major
MVESCTKMNFEETELRLGLPGGAAAAGEKTTNNNNYGKRGYEQTVDLKLNLSSKDLPNQTDLAENKKNDQPVKPPAKAQVVGWPPVRNFRKNVMAVQKTEKAEESGGSAAFVKVSMDGAPYLRKVDLKMYKTYEELSDALGKMFSSFTMSKCDAQGMMDFMNESKLMDLLNGSDYVPTYEDKDGDWMLVGDVPWEMFVGSCKRLRIMKGTEAIGLAPRAMEKCKSRS

SEQ ID NO: 2751 - protein, 285 aa, Zea mays
MGCKACDKPKPSYRKGLWSPEEDQKLRDYILLHGHGCWSALPAKAGLQRNGKSCRLRWINYLRPGLKHGTFSPEEEETVMSLHATLGNKWSRIAKHLPGRTDNEVKNHWNSYLKKRVEGKDGPSTPPSDSDDSHCAKPGRGGSTARETGDDRPADYSGSSEPREPSSSSSPDTSCLTGTPKVMFVDWLDMDCMGGGGGGPPGAAAAAAAPGLGAAAGVARVSTGDDQMTMDDGSASGRADVSLHGTFGDSGGAGCWEFHESFDQMQAAGFCDLLSSIGEYYFGLD

SEQ ID NO: 2752 - protein, 262 aa, Oryza sativa
  misc_feature (107)..(107): Xaa can be any naturally occurring amino acid
VAVLGMDESRSSSSAAGAGAKRPFFTTHEELLEEEYYDEQAPEKKRRLTAEQVQMLERSFQEENKLEPERKTELARRLGMAPRQVAVWFQNRRARWKTKQLEHDFDXTTAAQEVDQPDEHTEAASTTGFATVDGALAAPPPGHQQPPHKDDLVSSGGTNDDGDGGAAVVVFDVTEGANDRLSCESAYFADAAEAYERDCAGHYALSSEEEDGGAVSDEGCSFDLPDAAAAAAAMFGAAGVVHHDAADDEEAQLGSWTAWFWS

SEQ ID NO: 2753 - protein, 318 aa, Oryza sativa (japonica cultivar-group)
MEMAAAVGGSGRRDAEAELNLPPGFRFHPTDEELVVHYLCRKVARQPLPVPIIAEVDLYKLDPWDLPEKALFGRKEWYFFTPRDRKYPNGSRPNRAAGRGYWKATGADKPVAPKGSARTVGIKKALVFYSGKAPRGVKTDWIMHEYRLADADRAPGGKKGSQKLDEWVLCRLYNKKNNWEKVKLEQQDVASVAAAAPRNHHHQNGEVMDAAAADTMSDSFQTHDSDIDNASAGLRHGGCGGGGFGDVAPPRNGFVTVKEDNDWFTGLNFDELQPPYMMNLQHMQMQMVNPAAPGHDGGYLQSISSPQMKMWQTILPPF

SEQ ID NO: 2754 - protein, 216 aa, Eupomatia bennettii
MGRGKIEIKRIENSTNRQVTYSKRRGGIMKKAKELTVLCDAEVSLIMFSNTGKFSEYCSPSTTTKKIFDRYQEVSSTNLWNSHYEKMQAHLNKLKEDNNNLRREIRQRIGEDLEDLEIEELRGLEQNLDDSIKFVRERKYHVIATQTETYKKKLRNLHEAHARLVRALEGQAENGGYGLVDDGGPDYESALALANGGAHHHSLHDAGYGIHDLRLA

SEQ ID NO: 2755 - protein, 216 aa, Eupomatia bennettii
MGRGKIEIKRIENSTNRQVTYSKRRGGIMKKAKELTVLCDAEVSLIMFSNTGKFSEYCSPSTTTKKIFDRYQEVSSTNLWNSHYEKMQAHLNKLKEDNNNLRREIRQRIGEDLEDLEIEELRGLEQNLEDSIKFVRERKYHVIATQTETYKKKLRNLHEAHARLVRALEGQAENGGYGLVDDGGPDYESALALANGGAHHHSLHDAGYGIHDLRLA

SEQ ID NO: 2756 - protein, 189 aa, Magnolia grandiflora
GGIMKKAKELTVLCDAEVSLIMFSSTGKFSEYCSPSTTTKKIFDRYQQASGCSLWNSHYEKMQSHLNKLKEENNNLRREIRQRIGEDLDDLEIEELRGLEQNLESSIKVVRERKYHVISTQTETYKKKLRNLHEAHAKLIRELEGQSENGGYGLVDNGGLDYESALVLANGGAHSLHDTGFGIHDLRLA

SEQ ID NO: 2757 - protein, 197 aa, Gunnera tinctoria
KKAQELTVLCDAKVSIIMISNGSNKCHEYTSSSTSTKSIYDQYQKASGIDLWSSHYEKMQDSLRKLKDTNNRLRKEMRQRMGEDLDDLRFDQIVALKVKTISSITSIRERKFHVIKNQISTTNKKVKNLEEIQRNLLLDLEAKCEDPQYGMVDNEEDYEAAVPFANGANLHGFRLQLHHNHNLNHGGGYEFHDLRLA

SEQ ID NO: 2758 - protein, 198 aa, Gunnera tinctoria
KKAQELTVLCDAKVSIIMISIGSNKCHEYTSSSTSTKSVYDQYQKASGIDLWSSHYEKMQDSLRKLKDTNNRLRKEMRQRMGEDLDDLRFDQIVALIVKTISSITSIRERKFHVIKTQTQTYGKKVRNLKEIQRNLLLDLEAKCEDPQYGMVDNEEDYEAAVAFANGANLHGFCLQRIHHNHNLNHGGGYEFHDLRLA

SEQ ID NO: 2759 - protein, 1054 aa, Oryza sativa (japonica cultivar-group)
MGAPKQKWTAEEESALKAGIAKHGAGKWRTILKDPDFSNVLRYRSNVDLKDKWRNMNVTVNASGARDRVKAPVVKKPRSAPKHEGHSTSTAIAAVTSDGDDDVAEPVPLATSTSSKRSLSRLDNIIVEAVRSLNEPTGSYKTAIANYIEEQYWPPADFDHVLSSKLNDLTASGKLIKVNRKYRIAPSSSLSEGRSSKVVLLEDIKKEPTKLDREDVAVLTKSQIDAELARMRTMTAEEAAAAAARAVAEAEAIMAEAEAAVREAEAAEADAVAAQAFAEAAMATFKNRSSAKLVIALSTSVLVSNDHSSLKLPVGAGAASVSSDLVRDVFNLVWLLFNSKSLKGPCILLFGCRSSTRIGSVWFLFRFVGGELRKKNTFLWGFGRIEMEGTAQQGFPAMFLLRLGRCLSTFTSYSRNFDESYSYSHSYWLILKRGKNAFISDFFPLYLFPLLSKSAILGRLIEENSDSDECVIILSDIPGGAKSFELVARFCYGLKIELSSENVVYLRCAAEHLEMTEETSGDNLINQTESFFNQVVLRSWKDSLEALRTCDGLLPHAEDLHIVKRCIESLAGKASIDPDLFGWPVSEHSTMQSPGGSVLWNGISTGAKVRNCSSDWWYDDASSLSFPTYKRLISSMESRGIKQEIIAGSLTYYAKKFLPGLNRRQSTGPMPLPAATLSDEEQRRLLEEIDRMLPLQRGLISTNVLLWLLRTAMILKVDRACISNLEKRVGMQLDEATLEDLLLPNFSYTMDTLYNVECVHRILDHFLAMDQTMGGGGASPCLDDVMASPSLAPITAVAKLIDGYLAEIAPDINLKPLKFQSLAAVLPEYARPLDDGLYRAIDVYLKSHPTLPEAEREQLCRLIDCQKLSLEACTHAAQNERLPLRVVVQVLFFEQLQLRTSVAGCLLVSDNLEASSRTLRGGGAVAASGEAGCWARAALRENQALRVGMDSMRLRLMELERECSDMRQEIRKLGRGRRRLRGGGGIVAGGKDGGGWAARVQRMLTPRMMKLQMCSAQHDAAEQQRMNNEHKKVEKVAKNKKQLSMDDGDDEEEA

SEQ ID NO: 2760 - protein, 625 aa, Oryza sativa (indica cultivar-group)
MKREYQEAGGSSGGGSSADMGSCKDKVMAGAAGEEEDVDELLAALGYKVRSSDMADVAQKLEQLEMAMGMGGVSAPGAADDGFVSHLATDTVHYNPSDLSSWVESMLSELNAPLPPIPPAPPAARHASTSSTVTGGGGSGFFELPAAADSSSSTYALRPISLPVVATADPSAADSARDTKRMRTGGGSTSSSSSSSSSLGGGASRGSVVEAAPPAMQGAAAANAPAVPVVVVDTQEAGIRLVHALLACAEAVQQENFAAAEALVKQIPTLAASQGGAMRKVAAYFGEALARRVYRFRPADSTLLDAAFADLLHAHFYESCPYLKFAHFTANQAILEAFAGCRRVHVVDFGIKQGMQWPALLQALALRPGGPPSFRLTGVGPPQPDETDALQQVGWKLAQFAHTIRVDFQYRGLVAATLADLEPFMLQPEGEADANEEPEVIAVNSVFELHRLLAQPGALEKVLGTVHAVRPRIVTVVEQEANHNSGSFLDRFTESLHYYSTMFDSLEGGSSGQAELSPPAAGGGGGTDQVMSEVYLGRQICNVVACEGAERTERHETLGQWRNRLGRAGFEPVHLGSNAYKQASTLLALFAGGDGYRVEEKEGCLTLGWHTRPLIATSAWRVAAA

SEQ ID NO: 2761 - protein, 249 aa, Physcomitrella patens
MVVPSLPAFGGQNAMLRRNIDNNTDTLISLLQGSCSPRVSMQQVPRSSESLENMMGACGQKLPYFSSFDGPSVEEQEDVDEGIDEFAHHVEKKRRLSLEQVRSLERNFEVENKLEPERKMQLAKELGLQPRQVAVWFQNRRARWKTKQLERDYETLKKAYDRLKADFEAVTLDTSALKAEVSRLKGISNDDVKPAEFVQGKCDTTSHPASPAQSERSDIVSSRNRTTPTIHVDPVAPEEAGAHLTIELG

SEQ ID NO: 2762 - protein, 268 aa, Arabidopsis thaliana
MTKSGERPKQRQRKGLWSPEEDQKLKSFILSRGHACWTTVPILAGLQRNGKSCRLRWINYLRPGLKRGSFSEEEEETILTLHSSLGNKWSRIAKYLPGRTDNEIKNYWHSYLKKRWLKSQPQLKSQISDLTESPSSLLSCGKRNLETETLDHVISFQKFSENPTSSPSKESNNNMIMNNSNNLPKLFFSEWISSSNPHIDYSSAFTDSKHINETQDQINEEEVMMINNNNYSSLEDVMLRTDFLQPDHEYANYYSSGDFFINSDQNYV

SEQ ID NO: 2763 - protein, 246 aa, Arabidopsis thaliana
MEGGASNEVAESSKKIGRGKIEIKRIENTTNRQVTFCKRRNGLLKKAYELSVLCDAEVALVIFSTRGRLYEYANNSVRGTIERYKKACSDAVNPPTITEANTQYYQQEASKLRRQIRDIQNLNRHILGESLGSLNFKELKNLESRLEKGISRVRSKKHEMLVAEIEYMQKREIELQNDNMYLRSKITERTGLQQQESSVIHQGTAYESGVTSSHQSGQYNRNYIAVNLLEPNQNSSNQDQPPLQLV

SEQ ID NO: 2764 - protein, 1015 aa, Oryza sativa (japonica cultivar-group)
MEPGQLPMVARRCIRHQQSTSRLMSVAWSAMRPALRPMSLVRPTPFTAPSVSTCPVAMACCAASTAVWNPNEPPLLDLTVDCRRAAHHVVPTAVGVGRRRSRGGAGGRGCRRWASEGGAWKLVLSPQPMFCEEGSSESGYVLCVIDSLKKKITSDRFVYIQKRVEENSIKLSPITLHSHNLSKNRQTSTSNSTDLVSNLLTKRKEDALCAVNSRESSPDESEGANCQDECSSTVIVGGNLSARNSVRPIRLPEVATLPPYTTWIFLDRNQRMQEDQSVLGRRRIYYDTNCGEALICSDSEDEAVEDEEEKKEFKDSEDCIIRMTIQECGMSDAVLETLARDIERAPDDIKARYEILQGEKPEGSSKKVSELNVKMEDVYGDKDLDAALDSFDNLFCRRCLVFDCKLHGCSQDLVFPTEKQAPLCSSDEGTPCGIHCYKLVSKPDAIMEIDSHLLVDVEEPTSDNLKDQIGSNKKKLGSSGQKTKSQQSESSSTARVSSESSESEVQLLSNKSPQHSPGLSKNKLGAKGGIKKSTNRRIAERILMSVKKGQQEMSPDSNSIVNGCHWPRDMKLRSDTRSGIKDSVVSSQCNSPSTRSFRKKGTLQMENNSSFVDAQSDSMEDTNNEHSATDGCDSSRKEECVDESICRQEAHGRSWKVIEQGLLLKGLEIFGKNSCLIARNLLGGMKTCTDVFQYMNYIENSSASGALSGVDSLVKGYMKGNELRTRSRFVRRRGRVRRLKYTWKTAGYHFIRKRITERKDQPCRQYTPCGCQSACGKQCPCLTNGTCCEKYCGCPKMCKNRFRGCHCAKSQCRSRQCPCFAADRECDPDVCRNCWVGCGDGTLGVPNQRGDNYECRNMKLLLKQQQRVLLGRSDVSGWGAFLKNSVGKHEYLGEYTGELISHKEADKRGKIYDRENSSFLFNLNNEYVLDAYRMGDKLKFANHSPDPNCYAKVIMVAGDHRVGIFAKERISAGEELFYDYRYEPDRAPAWARKPEGPGAKDDAQPSTGRAKKLAH

SEQ ID NO: 2765 - protein, 233 aa, Arabidopsis lyrata subsp. petraea
  misc_feature (96)..(96): Xaa can be any naturally occurring amino acid
  misc_feature (144)..(145): Xaa can be any naturally occurring amino acid
MEGGASNEVAESSKKIGRGKIEIKRIENTTNRQVTFCKRRNGLLKKAYELSVLCDAEVALVIFSTRGRLYEYANNSVRGTIERYKKACSDAVNPPXVTEANTQYYQQEASKLRRQIRDIQNLNRHILGESLGSLNFKELKNLEXXLEKGIGRVRSKKHEMLVAEIEYMQKREIELQNDNMYLRSKITERTGLQQQESSVIHQGTVYESGVTSSHQSEQYNRNYIPVNLLEPNQ

SEQ ID NO: 2766 - protein, 182 aa, Oryza sativa (japonica cultivar-group)
MAFYLGSMGGSPSSWGVAEVPVPSSRPWSKAEDKVFESALVAFPEHTHNRWALVASRLPGRSAHEVWEHYQVLVDDVDLIERGMVASPGCWDDDNNSAGHGRGSGGDERRRGVPWTEEEHRLFLEGLEKYGRGDWRNISRWSVKTRTPTQVASHAQKFFIRQANASSRGDSKRKSIHDITAP

SEQ ID NO: 2767 - protein, 213 aa, Glycine max
MAVLPSSSSSLELTISVPGFASSPTLLPSSSVKELDINQVPLEEDWMASNMEDEEESSNGEPPRKKLRLTKEQSLLLEESFRQNHTLNPKQKESLAMQLKLRPRQVEVWFQNRRARSKLKQTEMECEYLKRWFGSLTEQNRRLQREVEELRAIKVGPPTVISPHSCEPLPASTLSMCPRCERVTSTADKPPSAAATLSAKVPPTQSRQPSAAC

SEQ ID NO: 2768 - protein, 1170 aa, Yarrowia lipolytica CLIB122
MANGSDTKPVPKGPRGARADDTRTPPHPDRRGSDRDQYFSKDRSYGGRTDRDYSDYDRAYPPPRDYDRYGGGKYGKYDKYDKYDRYDRLDSHDYPPRRDRDYDRSRDARDTDSRDYGRLPPRDTRPPPRGGREYRYARDERGWDRDRRDLDRDRDRDPRDRERDARDRDRDRDFRDRDHDPRDRDPKGYRPHSLDPLPSRDRDMPPRERERELVRERDLFSRDRDLITGVRELARSPPPPLRDGRNRDRSNDRHDRSFDKHTRDRGTRDRDTKEKGSVISTPQTAPTPRLTPTNGKPDLPTSQPPAPPSPPRLKTFPKEVWETVGRKNNTRLTYDPELSKDKQKGKRGIYEEVKKGASTTEDPRSKHPHYFKTSSKSNKKPYQRLPVPRFLYDANSIAPPPSTQIIVKGLSSLTTSKTITAHFKTYGELEAVNMVEDPATGSSVGACLVRFKVTKNNYEAAHECLKKAIRGQKTGRIDQAKYRVEPDEDGAKAKDIIKRVAARAAKKAMPVKQPPTAPAADKSIMEKLPTPVPSARPSPKAAQLMKTSAYIFIAGKYLPSEKVFASDIRRILRDFGWFDVLKEGDGFYVFFDNNRDTVECYEAMNGRKVNGHQMAMAMIRLSRVAPKTKESEENATEQAPKLPPKEEARKLIVQELANSLRKDIRERVIAAAIVEFLNPARFTHIKQDPEPSAATEPNTVNASAARVDTPEPVQSSSAIPGFLPRFKIKRKGDPTKKKDATKKNRKKISARPMNHVLNDYYSDEEDSTRMSTPIVPDTSADAAELPIRKPRKKISQSKQRIMDFSSSEGSNESEEEEEVEDDMEEEEDETAQEELQEASTLDTSQQLTTAFGEILDWAPAHGFPQPVTADKKGGALTTISGFQALVKDDEDMELLQEALEGIEPEKINGEAWTWTHKHLNEAVAKENAEFPELAAPNAFVNSTGSWKSQGYFKIPEAAKSEYLPHRKKLNIPIDTLQMENREKKKENASNSRVNRANNRRLVADINMQKQLLSTETDVLNFNQLRKRKKPVKFARSAIHNWGLYAIEPIAANEMIIEYVGEVVRQEIADLREARYMRSGIGSSYLFRVDESTVVDATKRGGIARFINHCCTPSCTAKIIKVEGQKRIVIYASRDIAANEELTYDYKFEKEIGEERIPCLCGAPGCKGYLN

SEQ ID NO: 2769 - protein, 287 aa, Populus euphratica
MGTLIQGSNATSMSMDSTKKRKRASNKSVAETLQKWKEYNEYLDAQGDEGNKPVRKVPAKGSKKGCMKGKGGPENSVCNYRGVRQRTWGKWVAEIREPDRGPRLWLGTFPTAYEAALAYDNAARTMYGPRARLNIPDVVNSTSSSKDNFSAVTPSYYYSAASSADSVTTSTHSEVCAYEDPNQNVLSHAEDWMTNISSQAEVCEQNASSQTEVYEQNVSSQHVEDCSRGVEKNSKLSQDELKIQPENPSWANDCHDYGWDEIFSVEELLGDIDSGMTGAEGYFSLGF

SEQ ID NO: 2770 - protein, 199 aa, Gunnera tinctoria
LKKAQELTVLCDAKASIIMISIGSNKCHEYTSSSTSTKSVYDQYQKASGIDLWSSHYEKMQDSLRKLKDTNNRLRKEMRQRMGEDLDDLRFDQIVALIVKAISSITSIRERKFHVIKTKTHTCGKKVRNLKEIQRNLLLDLEAKCEDPQYGMVDNEEDYEAAVAFANGANLHGFRLQRIHHNHNLNHGGGYEFHDLRLA

SEQ ID NO: 2771 - protein, 109 aa, Oryza sativa (japonica cultivar-group)
MSSSWTTKQNKLFERALATYDKDTPGRWQNVARAVGGGKTAEEVKRHYDKLLQDLHHIESAGRQGSQYGGSSSSKSKGGSSSGEQRYRNRDWKQQPGLHSGAVKRASQY

SEQ ID NO: 2772 - protein, 198 aa, Gunnera tinctoria
LKKAQELTVLCDAKVSIIMISNGSNKCHEYTSSSTSTKSIYDQYQKASGIDLWSSHYEKMQDSLRKLKDTNNRLRKEMRQRMGEDLDDLRFDQIVALKVKTISSITSIRERKFHVIKNQIGTTNKKVKNLEEIQRNLLLDLEAKCEDPQYGMVGNEEDYEAAVPFANGANLHGFRLQLHHNHNLNHGGGYEFHDFRLA

SEQ ID NO: 2773 - protein, 199 aa, Gunnera tinctoria
LKKAQELTVLCDAKVSLIMISIGSNKCHEYTSSSTSTKSVYDQYQKASGIDLWSSHYEKMQDSLRKLKDTNNRLRKEMRQRMGEDLDDLRFDQIVALIVKAISSITSIRERKFHVIKTKTHTCGKKVRNLKEIQRNLLLDLEAKCEDPQYGMVDNEEDYEAAVAFANGANLHGFRLQRIHHNHNLNHGGGYEFHDLRLA

SEQ ID NO: 2774 - protein, 849 aa, Arabidopsis lyrata subsp. lyrata
MVTDDSDSSGRILMDMIGHDGDDGEEDRLEGLENRLSELKRKIQGERVRSIKEKFEANRKKVDVHVSPFSSAASSRATAGDNGNSNVFSSRMEIPLCKLNGFSHGVGDRDYVPTKDVTAASVKLPIAERIPPYTTWIFLDRNQRMAEDQSVVGRRQIYYEKHGGETLICSDSEEEPEPEEEKREYSEGEDSVIWLIGQEYGMGEEVQDSLCQFLSVDASDILGRYNELKLKDEQNTEDFSNSGFKLGISLEKDLGAALDSFDNLFCRRCLVFDCRLHGCSQPLISASEKQPYWSDYEGDRKPCSKHCYLQVKAVREVPKAEEKASKEECSKAISSDDPHDAATGVNLQVEKTDIGFKNLDSSSGVEQEHGIRGKREVPNLEDSNDLPNLSNKKQKTTASDTKMSLVNSTPSLDQAFDSSKGDQSETVETNNVNRDSGADSKEVAEPLPDILVLDGGSSVCQPDHGSGNGSIIIGEMSEKSQPSTEWNPIEKDLYLKGVEIFGRNSCLIARNLLSGLKTCLDVSSYMRENEVSVFRRSSTPNLLLDDGRTDPGNDDDEVPPRTRLFRRKGKTRKLKYSTKSAGHPSVWKRIAGGKNQSCKQYTPCGCLSMCGKDCPCLTNETCCEKYCGCSKSCKNRFRGCHCAKSQCRSRQCPCFAAGRECDPDVCRNCWVSCGDGSLGEAPRRGEGQCGNMRLLLRQQQRILLGKSDVAGWGAFLKNSVSKNEYLGEYTGELISHREADKRGKIYDRANSSFLFDLNDRYVLDAQRKGDKLKFANHSAKPNCYAKVMFVAGDHRVGIFANERIEASEELFYDYRYGPDQAPAWARKPEGSKKDDSAITHRRARKHQSH

SEQ ID NO: 2775 - protein, 207 aa, Ribes sanguineum
NGLFKKATELTVLCDAKVSIIMFSSTNKLHEYLSPFISTKQVFDQYQNKLGIDLWQTHYERMQEHLKQLKDVNNNLRMEIRHRMGASLDGLSLAELRNLEEEMDGTLDIILERKRRVIGNQIDTLKKKVRNSEEVNRKLVHEFDVRCEHPHFGLVDNGGREYDTVFGYQNGGGARIFALHMQNNQTNHNHHLHSGGGSDLTTFALLE

SEQ ID NO: 2776 - protein, 233 aa, Glycine max
MALETLNSPTTTAPSFPFDDPTIPWAKRKRSKRCSRDHPSEEEYLALCLIMLARGGTTRRVSTPPPQPTPDPSTKLSYKCSVCNKSFPSYQALGGHKASHRKLAASGGEDQPTTTSSAASSANTASGGRTHECSICHKSFPTGQALGGHKRCHYEGNSNGNNNNSNSSVTAASEGVGSTHTVSHGHHRDFDLNIPAFPDFSTKVGEDEVESPHPVMKKPRPFVIPKIEIPQYQ

SEQ ID NO: 2777 - protein, 208 aa, Ribes sanguineum
NGLFKKATELTVLCDAKVSIIMFSSTNKLHEYLSPFISTKQVFDQYQNNLQIDLWQTHYERMQEHLKQLKDVNNNLRMEIRHRMGASLDGLSLAELRNLEEEMDGSVDIIRERKRRVIGNQIDTLRKKVRNSEEVNRKLVHEFDVRSEDPHFGLVDNGGSEYDTVLEYQNGGGARIFALHMQNNQANHHHQHLHSGGGSDLTTFALLE

SEQ ID NO: 2778 - protein, 228 aa, Hyacinthus orientalis
MGRGKIEIKRIENTTSRQVTFCKRRNGLLKKAYELSVLCDAEVALIVFSTRGRLYEYSNSNSVKTTIERYKKACTDTTNTGTVSEANSQYYQQEATKLRQQITNLQNTNRTLMGESLSTMSLRELKQLEGRLERGINKIRTKKNELLSAEIEYMQKREAEMHNDNMYLRNKIAENERAQQQMNMLPSTATEYEGIPQFDSRNFLQVSLMEPNNHHYSRQQQQTALQLG

SEQ ID NO: 2779 - protein, 237 aa, Oryza sativa (japonica cultivar-group)
MQPPYTYSNSYHHIHSSLPPEMSDRDVDMHILTALMADMADSSSSSSSSSSSSSSDDSDMRASAAAAEPEHRRSPAPPPPPRQQQLIGVRKRPWGKFAAEIRDSTRKGARVWLGTFDSPEAAAMAYDQAAFSVRGASAVLNFPLHRVQESLQALALGAAGGSPVLALKRRHSIRKRRKPTKHMLLMQQQQQEPTVVELEDLGADYLEELLRLSESSSSSSSSSISNFTTTPNRHCQS

SEQ ID NO: 2780 - protein, 172 aa, Sordaria macrospora
GNLEVMGMMQGYIEGSTMVITDAYRLPVEGTETRVNAQDEANEYMVEYLRLCREENRLENVIGWYHSHPGYGCWLSGIDVGTQSLQQQFNEPFVAVVIDPDRTVSQNKVEIGAFRTIPEGVKPPTATNATTGDGQGVPLNKVEDFGAHSHRYYALDVEHFKSTLDSKLLETL

SEQ ID NO: 2781 - protein, 374 aa, Glycine max
MYLSEKPRPIDFYKEEGARDMMIEVVSNGDLPPPPPPPPMILGESSGEDPEVEIKAPKKRAETWVQDETRSLIGLRREMDALFNTSKSNKHLWEQISAKMREKGFDRSPTMCTDKWRNLLKEFKKAKHQDRGSGSAKMSYYKEIDEILRERSKNVQYKSPTPPPKVDSFMQFADKGIDDTSISFGPVEATGRPTLNLERSLDHDGHPLAITTADAVAASGVPPWNWRETPGNGGESQSCCGRVISVKWGDYTRRIGIDGTPEAIKEAIRAAFRLRTKRTFWLEDEDQIIRSIDREMPLGNYTLHIDEGMAIKLPLYDEPDHIPVHTEDKIFYTEDDFRDFLTRRGWICLREFDSYRNIDNMDDLRPGAIYRGVS

SEQ ID NO: 2782 - protein, 311 aa, Brassica napus
MMKRLSSSDSVGGLISLCPTTSTDQPSPRRYGREFQSMLEGYEEEEEEAITEERGQTGLAEKKRRLSINQVKALEKNFELENKLEPERKVKLAQELGLQPRQVAVWFQNRRARWKTKQLEKDYGVLKTQYDSLRHNFDSLRRDNESLLQEIGKLKAKLNGEEEVEEDDEDEENNAVTMESDVSVKEEEVSLPEELTDPPSSPPQLLEHSDSFNYRSFTDLRDLLPLKAAASSVAAAGSSDSSDSSAVLNEESSSNVTAAPATVPRGSFLQFVKMEQTEDHDDFLSGEEACGFFSDEQPPSLHWYSTVDQWN

SEQ ID NO: 2783 - protein, 259 aa, Solanum demissum
MGRFDKEGLKKGPWTPEEDQKLLSFIDKHGCGSWRALPAKAGLQRCGKSCRLRWINYLRPDIKRGKFSLQEERTIIQLHALLGNRWSAIAAYLPSRTDNEIKNYWNSCLKKSHMAEWESARLEAEARLVQKSKILFHNNNSHNYNINPSTVSQQLPYYQQLPCLDILKAWQMTSTKLPTINDISHAILRNNSKNKKLDSSIPSSTLNSSENIFANNAPTTKVGDDHQNLHNLSTINSCFEDDHLQTELPSFMQEFSGFY

SEQ ID NO: 2784 - protein, 252 aa, Hordeum vulgare subsp. vulgare
MGHQTQMFDDPFASSMSSLDADIFSVAGGLHPSQWPGLDHDVSLAPAANNGTSSGGYGSPGGGDGSGSHRKISHNAYERDRRKQLNELYSDLRSLLPDSDHTKKLSIPITVSRVLKYIPELQKQVDGLEKKKEELTRASCKPGVLTMKENTVPIVSATCLDEREIMVQVSLVSTMAGALPMSKRIKVLENEGLRLISSSTSAFQNRTFYSLHLQRTQRTMSKECPAFCEELENALTQKAGYVYITSRLYVAE

SEQ ID NO: 2785 - protein, 263 aa, Arabidopsis thaliana
METLHPFSHLPISDHRFVVQEMVSLHSSSSGSWTKEENKMFERALAIYAEDSPDRWFKVASMIPGKTVFDVMKQYSKLEEDVFDIEAGRVPIPGYPAASSPLGFDTDMCRKRPSGARGSDQDRKKGVPWTEEEHRRFLLGLLKYGKGDWRNISRNFVVSKTPTQVASHAQKYYQRQLSGAKDKRRPSIHDITTGNLLNANLNRSFSDHRDILPDLGFIDKDDTEEGVIFMGQNLSSENLFSPSPTSFEAAINFAGENVFSAGA

SEQ ID NO: 2786 - protein, 563 aa, Debaryomyces hansenii CBS767
MSESEENLSFEYEDEIADGSESDFSFEEDLDSEEEEIHNDNDNDFESIQLFNNISSTNFHPIKRNRVSYEPWKLTSYIQEFLLDKAITLKNMQLPQCDFDNILIMLHFKNWQPEDVINAFYDDWPKLRDSCGLTEPSEKDNNVAKAKNFNCSVCCENYEITEVYSLSCDHKFCLNCYYEYARENIHNGRIIRCIDVECNLSIPHADLEMLLQSRNGKHDLKDFTLEMTKNHLLAAAAKVYIESHKLKWKWCPAPDCTNLTELVSRKVPKTEIGNGEDVDILNVPIVTCPESHEFCYDCQYENHLPCPCWIVKLWVKKCQDDSETANWIQANTQGCPKCGSLIEKNGGCNHMTCSKCRYEFCWICLVSWKEHGASYYKCNRFDPEETDAVKKLQQLKRLSLQRYLHFYKRFSVHESSMQGDKKIIDKVDNKMKLYMEEELKKKNKSQQNLSWIDVQFLHDAIRALTNGRKTLKWTYCFAFYLSKTNFSEIFEQMQDYLNKTVEDLSLIFEEVNSKKHKTQSSMIIMKHKQEIVNLSNLVTKRQKLLIECAYSGLNQGHLVFEVA

SEQ ID NO: 2787 - protein, 236 aa, Zea mays
MAAPRLERGGFQLPNTEQENSLFLRALISVVSGDTAALLPEAAAVEAPAAPVACARCGADGCAAAGCCELVAGSSSDSDDAGCSGTRANGGGLGLGLGASKRRGRGRKVIQYRGVRRRPWGKWAAEIRDPRRAARKWLGTFDTAEDAARAYDVAAVELRGQRAKLNFPARAAAAAPAAVQPPHHRPLPDRSLRENCGSNAASPVHVALAPTTQQNIWEGLNEIMMMEEERSFWSMR

SEQ ID NO: 2788 - protein, 245 aa, Nicotiana tabacum
MGRGRVQLKRIENKINRQVTFSKRRSGLLKKAHEISVLCDAEVGLIVFSTKGKLFEYSTDSCMERILERYERYSYAERQLTATDHETPGSWTLEHAKLKGRLEVLQRNQGHYAGEDLDSLCMKELQNLEHQLDSALKHIRSRKNQLMHESISELQKKDEALQEQNNNLSKQVKEGEKELAQQTQWEQQSHDHLNSSSFVLTQPLSSLHLGEAYPTAGDNGELEGSSRQQQQNTVMPPWMLRHLNG

SEQ ID NO: 2789 - protein, 211 aa, Trachycarpus fortunei
MVNFSDYSMDSPLAQRSASDEEAYATVSSAPPKRRAGRTKFRETRHPVYKGVRRRNADKWVCEVREPNKKSRIWLGTFPTAEMAARAHDVAAMALRGRSACLNFADSAWLCPVPRSSNSKDIQRAAVEAAEAFRPQTERVDAAESREDAAMAMIAGPSLAAADDPFYMEDGLNFGMQGYLDMASGMLMEPPPIYADEEVSDGDVSLWSYSI

SEQ ID NO: 2790 - protein, 257 aa, Triticum aestivum
MTTRPDGGGGGVGGDGAEGKQLVPVAAAASNGANGALAVRKAPSKDRHSKVDGRGRRIRMPIICAARVFQLTRELGHKSDGQTIEWLLRQAEPSIIAATGSGTTPASFSTSSPSSLRPPGAPHPQHPHAHAQPLAVSPHHHHLPHAAPFILGKRVRDDDGGGNGNGNGQAAAVTAAMAPAPGFWALPARGDFGQLWSFAPPPEMMAAAPAMAGEASAARVGNYLPMAQANLNLLASFSGGPGGAGQATGRAEEETAH

SEQ ID NO: 2791 - protein, 47 aa, Arabidopsis halleri subsp. halleri
AVAKKRRRRVRNRDAAVRSRERKKEYVQDLEKKSKYLERECLRLGRM

SEQ ID NO: 2792 - protein, 227 aa, Paulownia kawakamii
MAREKIQIKKIDNATARQVTFSKRRRGIFKKAEELSVLCDADVGLIIFSSTGKLFEYASSSMKEILGRHNLHSKNLDKLEQPSLELQLVEDSNYSRLSKEVAERSHQLRRMRGEELQGLSIEKLQHLKKSLESGLSRVIEKKGEKIMKGDQSTSRKGKQLMEENERLRQQVADISNDCKNNAASDSENIVYDEGQSSESVNACNSVGPPQDYDSSDTSLKLGLPYSG

SEQ ID NO: 2793 - protein, 484 aa, Physcomitrella patens
MNVSEGCSTLTGAQLKYSTDKSNMSYETVYRDAAVESPQREVSNESGSTLKEHDYFGLSEVLSSNSSSGKQPEKCCREELNLNESATTLQLGPPAAVKPSGQADGDDAHDEGAGPENPAKRSAYHMQQESLADGRKAAAEMGSFKIQRKNILEEFRAMKAHAHMTKSPKTVQTMQHNMHVSYSGAQMAFGGAKNNGVKRVFSEAVVANHNAASGVGVGVREGNDDVSRCEEMNGTEQLDLKVHLPKGMGMARMAPASGSPSFDNMQGPLNPFFRKSLVSKMPVPDGGDSSANASNDCANRKGMVASPSVQPPPAQNQTVGWPPVKNFNKMNTPAPPASTPARACPSVQRKGASTSSSGNLVKIYMDGVPFGRKVDLKTNDSYDKLYSMLEDMFQQYISGQYCGGRSSSSGESHWVASSRKLNFLEGSEYVLIYEDHEGDSMLVGDVPWELFVNAVKRLRIMKGSEQVNLAPKNADPTKVQVAVG

SEQ ID NO: 2794 - protein, 503 aa, Physcomitrella patens
MKFSNEVVHKSMNITEDCSALTGALLKYSTDKSNMNFETLYRDAAVESPQHEVSNESGSTLKEHDYFGLSEVSSSNSSSGKQPEKCCREELNLNESATTLQLGPPAAVKPSGHADGADAHDEGAGPENPAKRPAHHMQQESLADGRKAAAEMGSFKIQRKNILEEFRAMKAQAHMTKSPKPVHTMQHNMHASFSGAQMAFGGAKNNGVKRVFSEAVGGNHIAASGVGVGVREGNDDVSRCEEMNGTEQLDLKVHLPKGMGMARMAPVSGGQNGSAWRNLSFDNMQGPLNPFFRKSLVSKMPVPDGGDSSANASNDCANRKGMVASPSVQPPPAQNQTVGWPPVKNFNKMNTPAPPASTPARACPSVQRKGASTSSSGNLVKIYMDGVPFGRKVDLKTNDSYDKLYSMLEDMFQQYISGQYCGGRSSSSGESHWVASSRKLNFLEGSEYVLIYEDHEGDSMLVGDVPWELFVNAVKRLRIMKGSEQVNLAPKNADPTKVQVAVG

SEQ ID NO: 2795 - protein, 344 aa, Cicer arietinum
GFREFKDDSDFDEDEEDDDDDEGLLVGGKGFTFSSNNTKSFKTFSRGSTAAKSVSPKSNEQAEKACKRKRKNQYRGIRQRPWGKWAAEIRDPRKGVRVWLGTFNTAEEAARAYDAEARRIRGKKAKVNFPEEAPVTSSKRFKPNLENKLVNKNLNSFNPNGNKMFNFGENVENYYSPMDQVEQKPLVNNNNQYANMGPFSGNGVQHSQISPSADVTAYFSSEHSSNSFDYSDLGWGEQGPKTPEISSMLSAAAPLESESQYVQNNMQSNNNQNMLPVEDNSAKTLSEELADIESQLKFFETPYDDNWGDASLASFLGGDATQDGGNPMNLWSFDDLPSISGGVF

SEQ ID NO: 2796 - protein, 278 aa, Nicotiana tabacum
MVRAPCCEKMGLKKGPWIPEEDQILISFIQTNGHGNWRALPKQAGLLRCGKSCRLRWTNYLRPDIKRGNFTKEEEETIIQLHEMLGNRWSAIAAKLPGRTDNEIKNVWHTHLKKKLKDYKPPQNSKRHSKSKNHDSKGPTTSESSNNSDLTIINTQKHIDSPVLAPNSPQISSSTEMSTVTLVDDHQMVVIKQEVMESSEYFPEIDESFWTDELTTDNNWSSTDHVMVAANQELQVQLPFSSFKEENVDILATKMEDDMDFWYNVFIKTDDLPELPEF

SEQ ID NO: 2797 - protein, 601 aa, Arabidopsis thaliana
MAIETQLPCDGDGVCMRCQVNPPSEETLTCGTCVTPWHVPCLLPESLASSTGEWECPDCSGVVVPSAAPGTGNARPESSGSVLVAAIRAIQADETLTEAEKAKKRQKLMSGGGDDGVDEEEKKKLEIFCSICIQLPERPITTPCGHNFCLKCFEKWAVGQGKLTCMICRSKIPRHVAKNPRINLALVSAIRLANVTKCSVEATAAKVHHIIRNQDRPEKAFTTERAVKTGKANAASAENDVTRKQGVLVGESWEDRQECRQWGAHFPHIAGIAGQSAVGAQSVALSGGYDDDEDHGEWFLYTGSGGRDLSGNKRINKKQSSDQAFKNMNESLRLSCKMGYPVRVVRSWKEKRSAYAPAEGVRYDGVYRIEKCWSNVGVQGSFKVCRYLFVRCDNEPAPWTSDEHGDRPRPLPNVPELETAADLFVRKESPSWDFDEAEGRWKWMKSPPVSRMALDPEERKKNKRAKNTMKARLLKEFSCQICREVLSLPVTTPCAHNFCKACLEAKFAGITQLRERSNGGRKLRAKKNIMTCPCCTTDLSEFLQNPQVNREMMEIIENFKKSEEEADASISEEEEEESEPPTKKIKMDNNSVGGSGTSLSA

SEQ ID NO: 2798 - protein, 413 aa, Arabidopsis lyrata
SRRSFDFRLSSLHKGKAQGSSFREYSSSRDLLSPVIVQTSRWANLPPELLFDVIKRLEESESNWPARKHVVACASVCRSWRAMCQEIVLGPEICGKLTFPVSLKQPGPRDAMIQCFIKRDKSKLTFHLFLCLSPALLVENGKFLLSAKRTRRTTRTEYIISMDADNISRSSNSYLGKLRSNFLGTKFLVYDTQPPPNTSSSALITDRTSRSRFHSRRVSPKVPSGSYNIAQITYELNVLGTRGPRRMHCIMNSIPTSSLEPGGSVPNQPEKLVPAPYSLDDSFRSNISFSKSSFDHRSLDFSSSRFSEMGISCNDNEEETSFRPLILKNKQPRWHEQLQCWCLNFRGRVTVASVKNFQLVAARPSQPQGTGTAPATAPAHPEQDKVILQFGKVGKDMFTMDYRYPLSAFQAFA

SEQ ID NO: 2799 - protein, 337 aa, Saccharomyces cerevisiae
MKNDNKLQKEALMRLSQLRFPFADAPSIVQAHQKDEQIQGLLIMKVTELCKLIKSQLFVNSYPKELSIFAKLLYLLFTTGRRGRTLGEEYVDLTYTNRKGTRLAGRLKMIVFAFAYPLCPYFITKLYKKIMKNNKESKIEDTESVAAFCKGLLDFILDVHMTLFYFKGAFYSISKRIFGMRYVFKHILSKNEANFREEGSQKYKVLGYILLAQNVMKWYPVLTSTLGSWIYGRKRTNDSITRSSVGLQERSEHESIEGIPKESQLTHINLSDKNQLPFIPEASRKCILCLMNMSDPSCAPCGHLFCWSCLMSWCKERPECPLCRQHCQPQEILVLRQ

SEQ ID NO: 2800 - protein, 134 aa, Triticum aestivum
  misc_feature (113)..(113): Xaa can be any naturally occurring amino acid
  misc_feature (119)..(119): Xaa can be any naturally occurring amino acid
METALKSWEAENSIGLIDPHRDALYTYDSAEQKAIGLSTPWTKDPSYFKNVRISAVALLKMVMHARSGGSIEVMGLMQGKILGDTFIVTDAFRLPVEGTETRVNAQDEANEYXVTYLQXCREQGKLENAVGWYH

SEQ ID NO: 2801 - protein, 285 aa, Hordeum vulgare
APEYYFPTLVSSAEENMASFAATQLGLNLGYRTYFPPRGGYTYGHHPPRCQAEGCKADLSGAKRYHRRHKVCEHHSKAPVVVTAGGLHQRFCQQCSRFHLLDEFDDAKKSCRKRLADHNRRRRKSKPSDADAADKRRTQASKAAASTKGKAAGSSSKSTGTGDGMDIQVQLGSGDLSKDQDETMGQGEVVKEMQVDPKGKASMQLQQQQQQGHHVHGLHLQSQHGFPFPSTSAGSCFPQSQAVSSTDNTSNIGQVQQEQLGSLGFHQHSNILQLGQAMFDLDFDH

SEQ ID NO: 2802 - protein, 530 aa, Ostreococcus tauri
MTTLELGTPVTMTVPRGADVRMNFTLRDDGADVVFELERVANYPMVYVERGSGEEEWYRRQVGAYRVPDGEGRYGDVPTRGSAGENIAYGMFGLAGNYRSMKFIGMRAGWYDVRVKAELVAGAYGDAEFKLTARSGAQTSGGPLCPYDCSNNGECVNSGSASGDDTKCACSSTPFAGVAGSLAPFGNACRDMYRHYGTATSATPVISLEPGKFWYGSYDLSGIYRYSGDGVEISFNWRGVGGDPLLLIKVQSEPTLVDYDYYYQRFLSNGVTTLSLKNVMSDVRYYFAIYNRDLPSGANVDFTIQVTRASWYSQREPPNLMSMAFVLFICVSFCMVVMTIRRFFQRRQLRRFREQRMTQLAFQDGTRGQQTGTPEEVVQALPIVKFDPVLKEVIESEGHDPTCTICLDDYTNGEELRRLPSCKHLFHKECADLWLRGSCTCPICRTSVIGESTSQDSAPAPGMTPQTPERSIELTSLGGEYATYVPQSQLPQMTVVVVPSRALDDLAVEARRREDGNARGWHHRDTSSIV

SEQ ID NO: 2803 - protein, 269 aa, Zea mays
MTRKKMEMKPIENEEARQVCFSKRRQGLFKKASELSILCGATVGSVVFSTSGRSYSFGHPSINDVADRFLSSVAPGGVVASGGASASHGGSGTTSGAVTDTVHRLNMEYLELQQSLDSEKKKKERLQEAAAKEMGGRVMQCLNANVFELGLAELQELQKWLEAVDGAVKEKANRILAEARARQTARGPSLVPQPPMEMDIASTSRHLQSGTRHIGADSVALSFAGPSSSNNGFVGGSPEVHDPLLIVSGGRLQDVCGLGSFPNNQKNHG

SEQ ID NO: 2804 - protein, 292 aa, Oryza sativa (indica cultivar-group)
MAIIHDTSDQQEDNMRSYMDGGGAAAYEEEEEEVEDDDGGGGGGGGGLGEKKRRLAAEQVRALERSFEADNKLDPERKARIARDLRLHPRQVAVWFQNRRARWKTKQIERDFAALRSRHDALRLECDALRRDKDDLAGEIDELRDRPKRLEQASPMFPRTVACMDATRLVSWVNYLSTMCKQLALYLLDSSAVFNEEASPYSGAAIDHHHHQTPASYDTAGFTSFFAPSTTLTSSLSFPSMFHASSHFDGHQELLVGGGGAGAVADADLGGAGFFAGDEHAGGLSWYGAEGW

SEQ ID NO: 2805 - protein, 360 aa, Medicago truncatula
MNTLSLHFYTPHSFLSLKPKPQPRIQCCSTNNNIIDDIDMVKTKQGTYEQKQNKVCVLWDLDNKPPRGPPYNAAVSLKNLAERFGDVTDISAYANRHAFIHLPQWVLNQRRERKNLDILERKGIINPPEPYVCSVCGRKCKTNVDLKKHFKQLHQRERQKKLNRLNSLKGKKRQKYKERFVSGDDKYNDAVREILKPKVGYGLASELRRAGVFVKTVEDKPQAADWALKKQMMHSMSRGIDWLFLVSDDSDFSEMLRKAREANLGTVVVGDVDRALGRHADLWVPWNAVENGEVMDMDLIPRNRDRRRTNSTSTTMDDFGDVLFFHEGEEMEDDFMLEYSDDDDFDEDSDEEDEDGFYIY

SEQ ID NO: 2806 - protein, 275 aa, Glycine max
MLEGLDEEGCVEEPGHHSEKKRRLSVDQVKALEKNFEVENKLEPDRKLKLAQELGLQPRQVAVWFQNRRARWKTKQLERDYGVLKANYESLKLNYDTLQQDHEALLKEIKELKSRLVQEENNNNTESDVSVKEEMLTTTLCETAIPGSDTKELSYECFNKSDEVGGGSSVFHVDFKDGSSDSDSSAILNEENNNHSPNNNAAISSCGVLQSHGLLLSPSSSSMNNCFQFQKQYQTTTTQYVKMEEHNFLSADEACNFFSDEQAPTLQWYCSEEWS

SEQ ID NO: 2807 - protein, 212 aa, Dypsis lutescens
MESFSSDSMDSPFAQRSASDEEAYATVSSAPPKRRAGRTKFRETRHPVYKGVRRRNADKWVCEVREPNKKSRIWLGTFPTAEMAARAHDVAAMALRGRSACLNFADSAWLCSVPRSTSPKDIQRAAMEAAEAFRPRTEPDAAKSTREDAGTSMAAGPSLASADDPFYMEDGLNFGMQGYLDMAEGLLMEPPPILYPDEEVSGGDVSLWSYSI

SEQ ID NO: 2808 - protein, 211 aa, Cocos nucifera
MESFSSDSMDTPLAQRSASDEEAYATVSSAPPKRRAGRTKFRETRHPVYKGVRRRNADKWVCEVREPNKKSRIWLGTFPTAEMAARAHDVAAIALRGRSACLNFADSAWLCPVPRSSNSKDIQRAAVEAAEAFRPQTERVDAAESREDAAMAMIAGPSLAAADDPFYMEDGLNSGMQGYLDMASGMLMEPPPIYADEEVSDGDVSLWSYSI

SEQ ID NO: 2809 - protein, 106 aa, Zea mays
NSRVDPRVRRARTKLKQTEVDCEFLKRCCETLTEENRRLQREVAELRALKLVAPHHYARMPPPTTLTMCPSCERLASASASADQAGRAGPCWGPLPVFVDGPARRP

SEQ ID NO: 2810 - protein, 242 aa, Castanea mollissima
MVYPNQSMSLSPQRKIGRGKMEMKRIENTTNRQVTFCKRRNGLLKKAYELSVLCDAEVALIVFSTRGRLYEYANNSVKSTIERYKKACADSSNTGSVAEANTQFYQQESAKLRAQIGNLQNSKQANDGESLSNLTVKELKSLEIKLERGISRIRSKKNELLFAEIEYMQKREVELHNNNQLLRAKIAENERNQQNLNVMPAGGGSYELMQTQQYDSRNFFQVNALQPNHQYPREDQMSLQLV

SEQ ID NO: 2811 - protein, 765 aa, Oryza sativa (japonica cultivar-group)
MASSSNPSNLPCSSDGVCMLCKVLTTEVEQLRCSTCATPWHTPCLSSIPPLTDVAHWVCPDCSGDVTASYPPSDVVRPESSLIAAIRVIEADPVLSIQEKARRRQELLGHAGDAGAAITEAVGENVEDSESNNPLSMLNKNINCSFCMLLPERPVTTPCGHNFCLKCFRRWIENGKRACVICRAPITQKVAQDLRINLALVQAIRMAKAANNASTTGETTVYHYKENEDKPDRAFTTERAKRAGMANASSGQIFVTIAPDYFGPILEDHDPRRNRGVRVGDHWKDRMEGRQWGAHFPHIAGIAGQSTHGAQSVALSGGYLDDEDHGEWFLYTGSGGRDLSGNKRTSKEQSFDQKFEKLNAALRVSCLNGYPVRVVRSFKEKRSPYAPESGVRYDGIYRIEKCWRKTGVQGTFKVCRYLFVRCDNEPAPWTSDEHGDHPRPLPDIEELKNAIDITERKGNPAWDFDATDGWKWMITPPISRKAVVTGDPRGKKMQGAARHTNNLSMRERLLKEFRCSICRNVMEEPVTTPCAHNFCKKCLLGSYDNLSLTEERSRGGRTLRARKIVKKCPSCPSDIADFVQNPQVNRDIMNVIESLQKEAEKEDHARVSGEGSSAALVDSDDENDTAWENQDDGNLDEGGCNNPEDMITESVDLNSVTNVDNTENKVEVQQPHKRTAGAGKGKGGKWARTSSAPGDADARNVVTSTETLDGIAAENVADLVQIEDCTFTGVERADPNALEVDGKNMIPDFSEAEKVNPKQDQEVLP

SEQ ID NO: 2812 - protein, 243 aa, Castanea mollissima
MGRGRVEVKRIENKINRQVTFAKRRNGLLKKAYELSVLCDAEVALIIFSNRGKLYEFCSTSSMLKTLERYQKCSYGAVEVNKPGKELEISYREYLKLKARFESLQRTQRNLLGEDLGPLNTNDLERLERQLDSSLKKSGPLRQYMLDQLSDLQNKEHLLVEANRALAIKLDEISPRNNLRQSWEGGEQSMSYGPQNAHSQSFFQPLDCNPTLQIGYNASGSDQQLSGTTHAQQVNGFIPGWML

SEQ ID NO: 2813 - protein, 242 aa, Castanea mollissima
MGRGRVQLKRIENKYRQVTYSKRRSGLLKKAHEISVLCDAEVALIVFSTKGKLFEYSSDSSMETILERYERYSFAERQLVATDSESQGGWCMEFPKLTARVEVLQRNIRNFMGEDLDPLSFRELQNLEQQIDAGLKRIRTRKNQLMHESVMELQKKEKSLQEQNSVLAKKLKENEKNIPEQAHQEQPSLGLLSLPQQPMPSTLSLPSLTIGGAFQERAVDEDAGVQTRPTLMPPWMLRHVNG

SEQ ID NO: 2814 - protein, 197 aa, Brassica oleracea var. capitata
MGRKKLEIKRIENKSSRQVTFSKRRNGLIEKARQLSVLCDASVALLVVSASGKLYNFSAGDDLVKVIDRYGEQHADDDRKALDLQSEAPKYGSHHELLELVESKLVESNSDVSVDSLVQLENHLETALSVTRARKTELLLKLVDSLKEKEKLLKEENQGLASQMEKNNLAGAEADKMEVSPGQISDINCPVTLPLLY

SEQ ID NO: 2815 - protein, 214 aa, Zea mays
TTSRQVTFCKRRNGLLKKAYELSVLCDAEVALVVFSSRGRLYEYANNSVKSTIERYKKANSDSSNSGTVAEVNAQYYQQESSKLRQMIHSLQNANTRNIVGDSIHTMGLRDLKQMEGKLEKAIIKIRARKNELLYAEVDYMQKREMDLQTDNMYLRSKIAESNETGQPAMHMTMGAPPTSEYDHMAPFDSRNFLQVSMPQHYSHQLQPTTLQLG

SEQ ID NO: 2816 - protein, 251 aa, Solanum demissum
MTTSSSDAPCVDHNQKSKNEDKKQQQPQAKKPTTTKDRHTKVDGRGRRIRMPATCAARVFQLTRELGHKSDGETIEWLLQQAEPAVIAATGTGTIPANFSSLNISLRSSRHHSSATNYLAHNNNFGHVYPDRNYFNGVGLFSSENNSFFPSGNLNMLQAKEELCDDDDNDNDNNNNNTGRIKRSKSSSWANSSNNIHQPILGTRGGGGGGTAAEGQWGMLTAAMNSYRQSGGHASGSSNQLNGGDDHQHHS

SEQ ID NO: 2817 - protein, 232 aa, Triticum aestivum
  misc_feature (95)..(95): Xaa can be any naturally occurring amino acid
  misc_feature (133)..(133): Xaa can be any naturally occurring amino acid
  misc_feature (173)..(173): Xaa can be any naturally occurring amino acid
  misc_feature (189)..(189): Xaa can be any naturally occurring amino acid
MVVAATEARGGSYALPWRPEEEEALLWSDQWLPCRRQRPPSSTDPRVPPKATAPDLEHELGNLAPTYAAAGQISPYFGLEIFGRNSCLIAQNHLXMETYSEVFQYMSYIGNSSASGTLSRGDFLVKGYIKGHXLRWLSCFIRRQARVHCSKYTWKSAGYHFIRRRITERKDQXPCRQYNPCGGQSACGXQCPCPYKWGHAVEKYWGGPGRKRELRMHTWQEEDPEGQGRRDL

SEQ ID NO: 2818 - protein, 201 aa, Populus tomentosa
MEFERDLNLEATELRLGLPGTATQQLEKQTPSSNVTKSNKRSLPDMNEDSAGRSESSSVSSNDKKSDEQETAPPTETRVVGWPPIRSYRKNCLQAKKLEAEAAGLYVKVSMDGAPYLRKIDLKVYKGYPELLEVVEEMFKFKVGEPSEREGYNGSEYVPTYEDKDGDWMLVGDVPWEMFINSCKRLRIMKESEARGLGCAV

SEQ ID NO: 2819 - protein, 247 aa, Capsicum annuum
MGRGRVQLRRIENKINRQVTFSKRRSGLLKKAHEISVLCDAEVGLIVFSSKGKLFEYSTDSCMERILERYERYSYAERQLNATDVETPGSWTLEHAKLKARLEVLQRNQRHYAGEDLDSLSMKELQNLEQQLDSALKHIRSRKNQLMHESISELQKKDKALQEQNNNLSKQMKEREKQLAQQHTPWEQQNHDHLNSSSFGLPHPFNNNHLGEVYPTAGDNGEVEGSSRQQQQNAAVMPPWMLRHLNG

SEQ ID NO: 2820 - protein, 281 aa, Triticum aestivum
  misc_feature (104)..(104): Xaa can be any naturally occurring amino acid
  misc_feature (228)..(228): Xaa can be any naturally occurring amino acid
  misc_feature (265)..(265): Xaa can be any naturally occurring amino acid
  misc_feature (273)..(273): Xaa can be any naturally occurring amino acid
  misc_feature (280)..(280): Xaa can be any naturally occurring amino acid
MDSDDEPWGGSDDDPVAVGDYYYDCSDGGGGGGGEEDEGSDCAGDDYEVREEVASMREKRYIVLSENDIHERQEEAIRRVSSIFSIPRESACILLRHYKWNISXLSDEWFADEERVRHFVGLPTNGAVLPDCQELTCGICFEGYSTSALSSAGCGHLYCHECWEGYISASINDGPGCLSLRCPEPSCTAMVLEETINRLAKDEEKVKYKQFLSCSYLEDNKKIKWCPXPDCTRAVEFLGDENYDVSCMCKFSFCWNCTEETHRPXSCETVSKXILKNSAXS

SEQ ID NO: 2821 - protein, 226 aa, Arabidopsis thaliana
MVSPENTNWLSDYPLIEGAFSDQNPTFPWQIDGSATVSVEVDGFLCDADVIKEPSSRKRIKTESCTGSNSKACREKQRRDRLNDKFTELSSVLEPGRTPKTDKVAIINDAIRMVNQARDEAQKLKDLNSSLQEKIKELKDEKNELRDEKQKLKVEKERIDQQLKAIKTQPQPQPCFLPNPQTLSQAQAPGSKLVPFTTYPGFAMWQFMPPAAVDTSQDHVLRPPVA

SEQ ID NO: 2822 - protein, 310 aa, Hevea brasiliensis
MDRGIEILSPASYLQNSNWLFPETRATKWTPEENKQFENALALYDKDEPDRWQKVAAVIPGKTVGDVIKQYRELEEDVSDIEAGLIPIPGYSSSDAFTLEWFNNNQGYDGFRHYYTPGGKRTTAARSSEQERKKGVPWTEEEHRQFLMGLQKYGKGNWRNISRNFVTTRTPTQVASHAQKYFIRQSTGGKDKRRSSIHDITTVNLPDTKSPSPDEKKSSPDHSTTSLQSQPQQKMVGMAKGLIDWKPQNEGGRAAGVFSQANGNLLMAPLCGISSYGQKLQEQNLLRGTLPGYQFAPYNLIFQMRPMQRQ

SEQ ID NO: 2823 - protein, 375 aa, Fagus sylvatica
MCGGAIISDFIAPTGSRRLTADYLWGDRKKPISGKRFSKPVVDLDDEFELDFQGFKDEEESDIDEEEVLVQDVKPFTFSAPPSSGSKPVKSVEFNGQAEKSAKRKRKNQYRGIRQRPWGKWAAEIRDPRKGVRVWLGTFNTAEEAARAYDAEARRIRGKKSKGNFPMRLPVPKRSVKANLQKPLAKANLNSVQPNLNQNFNFMNSDQDYTMGLMEEKPFTNQYGYMDSIPVNADVGLKSFASNNTAPYFNSDQGSNSFDCSDYGWGEQGSKTPEISSVLSATLEGDESQFVEDAVPTKKLKSDSGNAVFIENNTAKTLSEELSAFESQMNFQMPFLEGSWESNMEALFSGDTTQDGNSMDLWSFDDLPVMAGGVL

SEQ ID NO: 2824 - protein, 333 aa, Triticum aestivum
  misc_feature (193)..(193): Xaa can be any naturally occurring amino acid
MDPRFQLPTPVPSSGGAGVRGHHRRAHSETFLRFPDTDLFLDPDGDFSFSDLDFPSLSDDSPAVSDPTPPPPPPMAASSSQTPAPRPPGGTHNRSLSLDAAFFEGLALQGGGGGGCGGHKRSGSMDGVNSPFEGESALSGGLDYAKKAMPAERIAELALLDPKRAKRILANRQSAARSKERKIKYTGELERKXVQTLQTEATTLSAQLTLLQRDTSGLTTENRELKLRLQSMEEQAKLRDALNDALREEVQRLKIAAGQAPKMNGSQFNGGLQQIPSYFSQQHQRQQQQQHQQQMAYLGGHQAQRHHPNHHQSPSNGGQSLSGLSLDDSMDFI

SEQ ID NO: 2825 - protein, 240 aa, Atriplex hortensis
MSYSYPPPLPSNTLNNFLSPKPVTMKTTGGPPKPTKLYRGVRQRHWGKWVAEIRLPKNRTRLWLGTFDTAEEAALAYDKAAYKLRGDFARLNFPNLRHEGSHIGGEFGEYKPLHSSVNAKLEAICESLAKQGNEKQGKSGKSKKKDVANNNNNTSSSSSSSCCTTATAAADAPQQQQRMPENGGDVKTESTSDSEVGSGGSSPLSDLTFGDNEEMGSENFLLESCPSHEIDWDAILSSES

SEQ ID NO: 2826 - protein, 300 aa, Oryza sativa (japonica cultivar-group)
MGRAPCCDKKGLKKGPWTPEEDKLLVDYIQANGHGSWRLLPKLAGLNRCGKSCRLRWTNYLRPDIKRGPFTAEEQKSIVQLHGIVGNKWSMIAAQLPGRTDNEIKNYWNTHLKKQLRRMGLDDPPPGPAAGCPAARHMAQWETARLEAEARLSLLSSSGAAATTTITAATTTTSASSSSTTAGPVAAAATSPADVFLRLWNSSIGDSFRKLAVVAAGSSSPSRADVTKDAVKQEEEAAPAGDDSSAASNEVEAATMAVDEYQMFLDFAGEELGLFHGRYGGFSLFPPVDLLEASLETAFK

SEQ ID NO: 2827 - protein, 150 aa, Magnaporthe grisea 70-15
MAGREQQINLDSLSTQQLSAVKKQLDEEVEHLTASFTQLHAAQGKFRECLRIVKEQSASPEAKKDVLVPLTNSLYVRGKLSDPSNVLVDVGTGFYIEKSTTSAAEFYEAKVKELGGNIQGLEGIVQGKTNNLRVVEEVLRQKLATGAKPS

SEQ ID NO: 2828 - protein, 302 aa, Pimpinella brachycarpa
MMIHQREDHLGLSLSLSSPAHRPSSSSSPLQLNLAPSMPTPSTPPFNLFHKKETSDGYILDACRVETRSFLKGIDVNRLPATTVDMEEEAGVSSPNSTISSVSGKRSLERSENGNGDDLLDCSRGLINSDEEDGDNSRKKLRLSKDQSAILEDSFKEHNTLNPKQKLALAKRLGLRPRQVEVWFQNRRARTKLKQTEVDCEFLKRCCENLTDENRRLMKEVQELRALKLSPQFYMQMTPPTTLTMCPSCERVSAPPSSSTGPSSTPVETPRPHHSGSSHHRVAFNPWAIAPAGHRSFDAVPH

SEQ ID NO: 2829 - protein, 264 aa, Solanum tuberosum
MCGGAIISDYEPAGNFYRKLSARDLWAELDPISDYWSSSSSSSTVENPYSAQSPVTHSVDKPKKSDSGKSNQLKKGNKTVKVEKEKSTGPRQRKNKYRGIRQRPWGKWAAEIRDPQKGVRVWLGTFNTAEDAARAYDEAAKRIRGNKAKLNFPAPSPPAKRQCTSTVAADPPPALLLESSNIISYNNSPLMNFGYDVQSQTPYYPMEMPVASDDYELKEQISNLESFLELEPADSSDQFSGIVDPDPLNVFLMEDFASTQHQFY

SEQ ID NO: 2830 - protein, 208 aa, Oryza sativa
  misc_feature (120)..(120): Xaa can be any naturally occurring amino acid
  misc_feature (179)..(179): Xaa can be any naturally occurring amino acid
  misc_feature (192)..(192): Xaa can be any naturally occurring amino acid
MGCKSCEKPRPNYRKGLWSPEEDQKLRDYILRHGHGCWSALPANAGLQRNGKSCRLRWINYLRPGLKHGVFSPEEEETVMSLHAALGNKWSRIARHLPGRTDNEVKNYWNSYLKKRVESXGGKTSQGPPTTPASAASSPADSDDSHSLQQKPHEPANSDSSEPVHESSSASADSSCLTXPRTTRPVSRPHSXVTTKVMYADWLDMEYI

SEQ ID NO: 2831 - protein, 359 aa, Vitis vinifera
MSPPLLGVGEEEGQSNVTILASSASMESVCQISSGLKERNYMGLSECSSVDSSAISTDSDGNKSSLNLKATELRLGLPGFLSPGREPELCLLSSTKLDEKPLFPLHPSKDLTYTSSQKTVVSGNKRGFADAMNGFSEGKFLANSEVNVMLSPRPSPNKENLGSQPAKMKEMASPKIVQERPRATNETPPNHTGTGNNNSSAPATKAQVVGWPPIRSFRKNTLATTSKNTEVDGKAGPGALFVKVSMDGAPYLRKVDLRNYSAYQELSSALEKMFSCFTIGQYGSHGAPGREMLSESKLKDLLHGSEYVLTYEDKDGDWMLVGDVPWQMFIETCKRLRIMKSCDAIGLAPRAVEKCKNRN

SEQ ID NO: 2832 - protein, 304 aa, Zea mays
MGSEADCDRIRGPWSPEEDDALRRLVERHGARNWTAIGREIPGRSGKSCRLRWCNQLSPQVERRPFTAEEDAAIVRAHARLGNRWAAIARLLPGRTDNAVKNHWNCSLKRKLAAASAPAGSSDVEARPTKRVSLSPDSPSGSGSGSGSGSGSGSGSDRSDLSHGAGQVYRPVARSGGFEPADCAMSRPLEEEEEEKEDPLTSLSLSLPGTDQRFHHDRAHSQFQELPASPPSPSPPPPPVLSAYPFSPVFMEAMQELIRTEVQRYMASVGVRAGCGAAGGADLCMPQLVDGVMRAAAERVGRMQ

SEQ ID NO: 2833 - protein, 198 aa, Trollius laxus
TGILKKAGELNVLCDAEVSLIMISNTGKLTDFFSPNISPRAFFDKYQHVSGVDLWESHYVRLQDTLMQLKETNTRLRREIGQRVGGDLSGLSLTDLRALELDLQSSAKIVRKRLYKLISTQTDTFKKKVRNLEEINANLVHEYEERVEEAYEIANHEAMSALELANAGSHMFGFRLQPSQPNLHDDGGAYGLHDLRLG

SEQ ID NO: 2834 - protein, 175 aa, Zea mays
MGMPAVRRRERDAEAELNLPPGFRFHPTDDELVEHYLCRKAAGQRLPVPIIAEVDLYRFDPWALPDRALFGTREWYIFTPRDRKYPNGSRPNRAAGNGYWKATGADKPVAPRGGRTMGIKKALVFYAGKAPKGVKTDWIMHEYRLADAGRAAASKKGSLRLDDWVLCRLYNKKNE

SEQ ID NO: 2835 - protein, 226 aa, Glycine max
  misc_feature (100)..(100): Xaa can be any naturally occurring amino acid
MRKGRGGGASAAAAAAVNGSVLKEPRYRGVRKRPWGRFAAEIRDPLKKARVWLGTFDSAEDAARAYDTAARNLRGSKAKTNFPLSPFCYQHPPRILSSTXGFHDHQNNSNNNNDNLNNPQRPTSSGMSSTVESFSGPRPPTTTTTTTTTTATPFLTTTRRYPRTPPLVPEDCHSDCDSSSSVVDDSDDNIVSSSFRPPLPFDLNALPFDDDAAVVDDDLRCTALCL

SEQ ID NO: 2836 - protein, 277 aa, Petunia x hybrida
MALEALKSPTAATPTLPPRYEDQVDMSNLDSWVKGKRSKRPRIETPPSEEEYLALCLIMLARSGNGTTPSSIPGSTDTTTISKEPEKKNRDVAPVYQETEQSYKCSVCDKSFSSYQALGGHKASHRKITTIATTALLDDNNNNPTTSNSTNGNVVNNISTLNPSGRSHVCSICHKAFPSGQALGGHKRRHYEGKLGGNNNNNHRDGGGHSGSVVTTSDGGASTHTLRDFDLNMLPPSPELQLGLSIDCGLKSQQVPIEQEVESPMPLKKPRLLFSMD

SEQ ID NO: 2837 - protein, 338 aa, Solanum demissum
MGRSKCCDEEGLKKGPWTHEEDQKLLSFIDKYGCGSWRGLPAKAGLQRCGKSCRLRWINYLRPDIKRGKFSLQEERTIIHLHAFLGNRWSTIATYLPSRTDNEIKNYWNSRLKKRLMKMGIDPMTHKPNAAGSSKYVANLSHMAEWESARLEAEARLVRKSKILFNKNNNSHNYNINPTTISQQLPYHQQLPCLDILKAWQMTSTKLPTINDISHAILLNNSRNKNLESSIPSTLNSSENIFANNVPTTTKVADDHQNLHNLSTINSCFEDDQLQTELPSFMQEFSGVFPEYTQNSTNGLQVDNIMGSFYGDFEDNKLINWNNFPNYLVNSPIGSPVF

SEQ ID NO: 2838 - protein, 282 aa, Arabidopsis thaliana
MMMGKEDLGLSLSLGFAQNHPLQLNLKPTSSPMSNLQMFPWNQTLVSSSDQQKQQFLRKIDVNSLPTTVDLEEETGVSSPNSTISSTVSGKRRSTEREGTSGGGCGDDLDITLDRSSSRGTSDEEEDYGGETCRKKLRLSKDQSAVLEDTFKEHNTLNPKQKLALAKKLGLTARQVEVWFQNRRARTKLKQTEVDCEYLKRCVEKLTEENRRLEKEAAELRALKLSPRLYGQMSPPTTLLMCPSCERVAGPSSSNHNQRSVSLSPWLQMAHGSTFDVMRPRS

SEQ ID NO: 2839 - protein, 274 aa, Petunia x hybrida
MALEALKSPTAATPSLPPRYEDHVDMNNLDSWVKGKRSKRPRIETPPSEEEYLALCLIMLARSGNGTTPGSTDTTITTTISKEPEKKNRELTPVHQETEQSYKCSVCDKSFSSYQALGGHKASHRKITTIATTALLDDNNNNPTTSNSTSGNVVNNISALNPSGRSHVCSICHKAFPTGQALGGHKRRHYEGKLGGNNNNHRDGGGHSGSVVTTSDGGASTHTLRDFDLNMLPPSPELQLGLSIDCDLKSQIPIEQEVESPMPLKKPRLLFSMD

SEQ ID NO: 2840 - protein, 141 aa, Glycine max
MKNSLFLLHNANTIHFNLHSQITLPSIPLTTITTTKPFPHNRHFPRIEIDMVKNSQGIYAPKASKVVVLWDLDNKPPRGPPYDVAISLKTLAARFGDLVDFSAYANRHAFVHLPQWVLQQRRDRKNLDILERKGIITPPEP

SEQ ID NO: 2841 - protein, 105 aa, Brassica napus
  misc_feature (81)..(81): Xaa can be any naturally occurring amino acid
  misc_feature (98)..(98): Xaa can be any naturally occurring amino acid
SFLRGLDVNRAPSRVVDDVEEDAGVSSPNTTISSVMSGKRNDRELVAAAGTAGGRTIDDNKAERGSSSLGGGSDDEDGGGXGDDGYTQMLRLDKEQAXVLDETFK

SEQ ID NO: 2842 - protein, 437 aa, Oryza sativa (japonica cultivar-group)
MNEKDATDLEERSEASEHGQALSFHGGAMFLQEAQIASPAAANNALTSMANPFPIPPGLWNPPSHNMGLGETSFSSLLGMLSAGAPPPFVATPGFVDSTAGFPCYNGGNLGAMINHPFPGIHQPLGDFQNGVEPCREIEDIEIEGSKNVSQTGEKQQGDGETTHAVDSSSKELSMPGRNGGAGHDEGTRVSCSKKRKRSGQDGGVKHAEGGEQLATVGSAQKNEDDEKGEPKRSSVASGKSSGKQIKDNAGSPKEDYIHVRARRGQATNSHSLAERVRREKISERMKYLQDLVPGCSKVTGKAVMLDEIINYVQSLQRQVEFLSMKLASVNPTLDFNIERILSKDIFQCRGTTASSAFGFFPDIVHPRLHPPKYTQVGMPSIVNPTDAFGRVIHAPLGTNSAFKEPKHQMPNNLNGEFQDVIEMPFTHDHHGSNDQP

SEQ ID NO: 2843 - protein, 264 aa, Gerbera hybrid cv. 'Terra Regina'
MENSDVLELDFSCVDRSMSFPDDTGDMSPQRKMGKGKIEIKRIENTTNRQVTFCKRRNGLLKKAYELSVLCDAEVALIVFSSRGRLYEYANNSVKGTIDKYKKACLDPPTSGTVAEANTQYYQQEAAKLRQQIANLQNQNRQFYRNIMGESLGDMPVKDLKNLEGKLEKAISRIRAKKNELLFAEIEYMQKRELELHNSNQFLRAKIVENERAQQHHMSLMPGSSDYELVTPHQPFDGRNYLQTNDLQPNNDYSCQDQTPLQLV

SEQ ID NO: 2844 - protein, 246 aa, Gerbera hybrid cv. 'Terra Regina'
MSFPNDSGEMSPQRKLGRGKIEIKRIENTTNRQVTFCKRRNGLLKKAYELSVLCDAEVALIVFSSRGRLYEYANNSVKGTIDRYKKACLDPPSSGSVAEANAQFYQQEAAKLRQQIANLQNQNRQFYRNIMGESLGNMPAKDLKNLESKLEKGIGKIRSKKNEILFAEIEYMQKRENELHNSNQFLRSKIAENERAQQHMSLMPGSSDYELVAPHQPFDGRNYLQVNDLQPNNNYSCQDQTPLQLV

SEQ ID NO: 2845 - protein, 334 aa, Pisum sativum
MDGREAMAFSGGPGSYYLHRGGVEAAGSGSGGFQVPPGFRALPNNGIIAQPNVRAQGGNGDTSSMFSLEPQSHADFNHDISVGASSGAPSSEPVKKKRGRPRKYGPDGSVSLKLSPMSAPANSTQDSGTPSEKRGRGRPRGSGRKQQLAALGDWMTSSAGLAFSPHVITIAAGEDIAAKLLLLSQQRPRALCILSGTGIASKVTLRQPASTNAGVTYEGKFQILSLSGSYLVSEDGGPTNRTGGISVSLSSRDGHVIGGSVAMLIAGSPIQLVVCSFVYGGGSKVKTKQGMITNGESSEPHNDNLGSPASAPPDQNYISSPTGMWPGSQPSDMK

SEQ ID NO: 2846 - protein, 226 aa, Gerbera hybrid cv. 'Terra Regina'
MGRGKIEIKKIENNTNRQVTYSKRRNGIFKKAHELTVLCDAKVSLIMFSNTGKFHEYISPSTTTKKMYDQYQSTVGFDLWSSHYERMKETMKKLKDTNNKLRREIRQRVLGEDFDGLDMNDLTSLEQHMQDSLTLVRERKYHVIKTQTDTCRKRVRNLEQRNGNLRLDYETIHQLDKKYDTGENEGDYESVVAYSNGVSNLYAFCVHPNNIPHGAGYELHDHQHTN

SEQ ID NO: 2847 - protein, 347 aa, Pisum sativum
MDGREAMAFSGGPGSYYLHRGGVEAAGSGSGGFQVPPGFRALPNNGIIAQPNVRAQGGNGDTSSMFSLEPQSHADFNHDISVGASSGAPSSEPVKKKRGRPRKYGPDGSVSLKLTPMSAPANSTQDSGTPSEKRGRGRPRGSGRKQQLAALGDWMTSSAGLAFSPHVITIAAGEDIAAKLLLLSQQRPRALCILSGTGIASKVTLRQPASTNAGVTYEGKFQILSLSGSYLVSEDGGPTNRTGGISVSLSSRDGHVIGGSVAMLIAGSPIQLVVCSFVYGGGSKVKTKQGMITNGESSEPHNDNLGSPASAPPDQNYISSPTGMWPGSQPSDMKSAPAHTGIDLTRG

SEQ ID NO: 2848 - protein, 320 aa, Oryza sativa (indica cultivar-group)
MELGLSLGDAVTVADGGRLELVLGLGVGVGAGVRRGEEEERGRREDVVGAARWAAMAAASPEPSVRLSLVSSLGLHWPSETGRSEAAARGFDVNRAPSVAAGAPGMEDDEEGPGAAPALSSSPNDSGGSFPLDLSGHGLRGHAEAAAQARSWPLTLMLLTGGEQKQKVALAKQLNLRPRQVEVWFQNRRARTKLKQTEVDCEYLKRCCETLTEENRRLHKELAELRALKTARPFYMHLPATTLSMCPSCERVASNPATASTSAPAAATSPAAAPTAAARTAVASPEPHRPSSFAALFAAPLGFPLTAAQPRPPPPASNCL

SEQ ID NO: 2849 - protein, 378 aa, Oryza sativa (japonica cultivar-group)
MDFSCFNPQPAISHGIPFDSFLLQDELHHHADLDHPFEAEGITVHGSELEGGSVLPFATLHDLDHEFFRRGSRKDFIDNASSIFLLNPKTEVSHLVRDVQVGAFGAYEMNGRLISRNKASRKGIKKADAVKGHWTVEEDRKLVKLVEQFGLKKWSLIGGMLPGRVGKQCRERWFNHLRPNIKKDTWSEEEDMVLIQIHKEVGNRWAEIAKCLPGRTENSIKNHWNATKRRQFARRRNRSTSKSGSTVLQNYIKSLAISPQESQMNNERSESNPSDMMITQGTPCCFDGNNCSQSHTSEENIVPSCGDFAAEMWSGLFDTKEDEEDEAQYLLYDMDTHVDMNCIFSNMDYGSNIEPGLASVVKAECSAESWAVNLKETD

SEQ ID NO: 2850 - protein, 75 aa, Triticum aestivum
KELPVDEDLPGMGQFYCLHCDRYFASESVKDDHYRSKRHKKRVKVMSGPAPHTQLDAELAAGMGKPDNGLKLMSM

SEQ ID NO: 2851 - protein, 342 aa, Triticum aestivum
  misc_feature (266)..(266): Xaa can be any naturally occurring amino acid
  misc_feature (322)..(322): Xaa can be any naturally occurring amino acid
MELAGAAHPQPPESDVAPPRTPPQAPAEDSCKDTGDTRITEENSCTPPDLNLSQPNNSGLNSSSACENQTSNGDEMTEPESTLEAAKTEGDGSNKEKVLKKPDKILPCPRCNSMDTKFCYYNNYNIHQPRHFCRGCQRYWTAGGSMRNLPVGAGRRKSKSSSTNCNGILIPGDSLSAPGGDASVIPLPIKENQPAVKFGSDSTLPNSMASLLRVEEQNKNSNPASTAHPRNGENQTCPPSATTSDNPRIESVKVAVGVHQNGITGXCNGVTPMPPIPCFPGAPFMYPWNPAWNGVPAMAAPVCPVPAGPANCPENGHGGNIXWELPPWVPMPGSCGPPFLSC

SEQ ID NO: 2852 - protein, 253 aa, Petunia x hybrida
MTLETLKSSSTPKTSKPTIPLPPKPINDAIDIHKRKRSKRPRIETPPSEKEFLALCLIMLARSGGKNPTTTPTTITNEPLQVQEPINKPLQVQEPINEQSYKCNVCNKSFHSYQALGGHKASHRNKNLSTTTVSYDDTNPSTSNSLNPSGRFHECSICHKCFSSGQALGGHKRRHYEGNLGGGVSRGDTVISSEGGGSAVIRRDFDLNLPPSPELTLGMSVDCERKSQLSGEQEVESPMPTKKPRLAFRIDGN

SEQ ID NO: 2853 - protein, 141 aa, Arabidopsis thaliana
ASELATLCNAELGIVVFSPGGKPFSYGKPNLDSVAERFMREYDDSDSGDEEKSGNYRPKLKRLSERLDLLNQEVEAEKERGEKSQEKLESAGDERFKESIETLTLDELNEYKDRLQTVHGRIEGQVNHLQASSCLMLLSRK

SEQ ID NO: 2854 - protein, 253 aa, Petunia x hybrida
MALEALNSPTTTTPPSFQFENNGLKYLESWTKGKRSKRQRSMERQCTEEEYLALCLIMLARSDGSVNNSRSLPPPPLPPSVPVTSQINATLLEQKNLYKCSVCGKGFGSYQALGGHKASHRKLVSMGGDEQSTTSTTTNVTGTSSANVNGNGRTHECSICHKCFPTGQALGGHKRCHYDGGNGNGNGSVSVGVTSSEGVGSTISHHRDFDLNIPALPEFWPGFGSGEDEVESPHPAKKSRLSLPPKLELFKGL

SEQ ID NO: 2855 - protein, 224 aa, Brassica napus
EWTTTRNLENVRVAFMPPPWPESSSFNSLHSSNYDPYSGNSCTPTDAQIGPVISVPESEKIINAYQFPSNDNEMIKKKRLTSGQLASLERSFQEDIKLDSDRKLKLSRELGLQPRQIAVWFQNRRARWKAKQLEQLYDSLRQEYEVVSREKQMLHEEVKKLRALSRNTQSCFCVFQEMGEPPRVINHPVRERRVVLQPDQSESHQTDNLRSVLARRRYPGLDSF

SEQ ID NO: 2856 - protein, 508 aa, Zea mays
MDAHTTHIVARKNTSLSFTSNELMDHFPFAWLPMDPFTAMALSGTLSPSFSTTSTNDTMYNLNPALYASLVPPIRKPATPTTLEVGRQCKEDEDASIRLVHLLITCTSAIETGDYSIAQGNLSEARKILGEIPTSTGIGRVGKHFIDALVQRLFPAYPHAAPPSPSPSTSIDLHNNFYDAGPYLKFAYSTANQAILKAIKGYNHVHIIDFSLMQGLQWPALMDVFSAREGGPPKLRITGIGPNPIGGRDELHEVGIRLAKYAHSVGIDFTFQGVCVDQLDRLCDWMLLKPIKGEAVAINSILQLHRLLVDPDANPVVPAPIDILLKLVIKINPMIFTVVEHEADHNRPPLLERFTNALFHYATMFDSLEAMHRCTSGRDITDSLTEVYLRGEIFDIVCGEGSARTERHELFGHWRERLTYAGLTQVWFDPDEVDTLKDQLIHVTSLSGSGFNILVCDGSLALAWHNRPLYVATAWCVTGGNAASSMVGNICKGTNDSRRKENRNGPME

SEQ ID NO: 2857 - protein, 227 aa, Arabidopsis thaliana
MALEALTSPRLASPIPPLFEDSSVFHGVEHWTKGKRSKRSRSDFHHQNLTEEEYLAFWLMLLARDNRQPPPPPAVEKLSYKCSVCDKTFSSYQALGGHKASHRKNLSQTLSGGGDDHSTSSATTTSAVTTGSGKSHVCTICNKSFPSGQALGGHKRCHYEGNNNINTSSVSNSEGAGSTSHVSSSHRGFDLNIPPIPEFSMVNGDDEVMSPMPAKKPRFDFPVKLQL

SEQ ID NO: 2858 - protein, 159 aa, Brassica napus
  misc_feature (25)..(25): Xaa can be any naturally occurring amino acid
RKPLHKRGRKTSVAESSDYRKHESXSPIYHDGFLWRKYGQKQIKESNHQRSYYKFAYTKDQNCEAKKQVQMIQHNPPLYSTIYFGHHTCQLHQAYATFSMDTSDPQDSHMIRFDHPDSSLHQHQNQSQNQIIYLKDENMMMLPDKSEEWSSPSQWMSSE

SEQ ID NO: 2859 - protein, 331 aa, Lupinus breweri var. bryoides
STYISSGPYPYFSSSSSPYHPFAFFNPEISSSNNTFSHDLLSFPYNIPTTHLYHAPTQETLSNFADCAASAAMFKTDVSGNSNFGFSNFLAKKPASKKDRHSKIHTSQGFRDRRVRLSIEIARKFFDLQDMLGFDKASNTLEWLFNKSKKAMKELARSKNSSSGVVANSFSSSDSEFEVVSMINPDSIDATPEGVVVDPKDRKLKRAKIKESREKARARARERTNEKMLSSMKKKYPAIETPNNKSILSHHHNPHLMCSETPRDDFNHFEESIVIKRKLKQNHVIPKESNFNNNTEHHSFPILSPNLDANNGANGRSNLCAVTNMNLSTGM

SEQ ID NO: 2860 - protein, 222 aa, Zea mays
MEEEGVGKSWLALGIGGGDLMKRNNRPPVQVDLLFPPQSVKEEGAASKKAEKGGGRKRLKVVTADEDGRQSPHGGPGPSDGSGAGARKKLRLTNEQSTLLEDTFRAHNILSNAQKQELARQVDLSARQVEVWFQNRRARTKLKQTEVDCEILKRCCESLTGENQRLRLELAQLQRSAAAAAEAGLYVQSSFPPLATATATASVCPSCDKIEQSRFIFCLVKE

SEQ ID NO: 2861 - protein, 346 aa, Lupinus lepidus var. utahensis
  misc_feature (60)..(60): Xaa can be any naturally occurring amino acid
  misc_feature (71)..(71): Xaa can be any naturally occurring amino acid
SGPYPYFSSSSSPYHPFAFFNPENSSSNNTFSHDLLSFPYNIQPTHHYHAPTQETLSNFXDCAASAAMFKXDVSGNSNFGFSNFLAKKPASKKDRHSKIHTSQGLRDRRVRLSIEIARKFFDLQDMLGFDKASNTLEWLFNKSKKAMKELARSKNSSSGAVANSFSSSDSEFEVVSMINQDSIDATPEGVVVDSKDRKLKRAKIKESREKARARARERTNKKMLSSMKKKYPAIENPQMFNQLRLPFNHPENSAKSPNNKSILSHHHNPHLVCSETPRDDFNLFEESIVIKRKLKQNHVIPKESNFNNNTEHHSFPILSPNLDANNGANGRSNFCAVTNMNLSTGM

SEQ ID NO: 2862 - protein, 219 aa, Gossypium arboreum
MSMKKEGEILYKKGLWAMEEDKLLIDYVNVHGKGQWNKIANRTGLKRSGKSCRLRWMNYLSPNVKKGDFSEEEEDLVIRLHKLLGNRWSLIAKRVPGRTDNQVKNYWNSHLRKKLGIIDQNKTRIDFCQSSKQVKVCHVDEAATDPSPGHGTTTETTGITVDQSNQQEVIDHRVLNNTTQESMTTESYINTFWIPDHDYELSTLAMIDHFHECSSFHLS

SEQ ID NO: 2863 - protein, 202 aa, Brassica napus
MALILFRLLGESNTPSPVTNTSTVSLNSDLVVILAALICALICVLGLIAVSRCVWLRRLAAGTRTSSGSQDGSGQSPPQQAAAANKGLKKKALQSLPKVTFSPESPSSEKFAECAICLTEFSAGDELRVLPQCGHGFHLSCIDTWLGSHSSCPSCRQILVVARCHKCGGLPGSSSSGSEPEPEPEIVIRIKQGEDDPSSYLP

SEQ ID NO: 2864 - protein, 201 aa, Oryza sativa (japonica cultivar-group)
MRHLLQSSEHLTAATATAAASGGRGVHTDTFLILAAVLCFLLCVVGLALVARCSRLCNPSSFAVEAEEAMPPAPCKGLKRKALLSLPTVSFAEAAAAEEEEERPECAICLAEFARGDEVRVLPPCGHGFHAACVDVWLVSTSTCPSCRRAIVVLAAPSPAVTAAATDPPPPCCAADAAQASSQPPQPTGASDRGGCRTSVP

SEQ ID NO: 2865 - protein, 155 aa, Brassica oleracea
MKKLEADDTKPPEPPKDYIHVRARRGQPADSHRFAERVRREKISEMLTLLQDLVPDSSRITGKADSLDEIINYVQSLKRQVELLYMKLATINPRMESNRNAALSIKVKENMLYAIACSEQRLPLGYYSLAQNMPRFSDTQFLSNYGFVQTKVISR

SEQ ID NO: 2866 - protein, 202 aa, Phytolacca americana
KRRNGLLKKAYELSILCEAEVALIVFSSRGRVYEYSNNNIRSTIERYKKASSDGSNSASFIEINAQYYQQESAKLRQQIQVMQNSNRNLVGECLSSLNVKELKQLENRLERGMSRIRSKKHELLLADIEFLQKREKELEHENSFIRAKINEVERLQQLNMMPSEDLSAMNAFVTRSDHILAQNMLDTSSAFSNASKKLLHLG

SEQ ID NO: 2867 - protein, 650 aa, Oryza sativa (indica cultivar-group)
MAPVSLPPGFRFHPTDEELIIYYLKRKINGRQIELEIIPEVDLYKCEPWDLPEKSFLPSKDLEWYFFSPRDRKYPNGSRTNRATKAGYWKATGKDRKVNSQRRAVGMKKTLVYYRGRAPHGSRTDWVMHEYRLDERECETDSGLQDAYALCRVFKKTAPGPKIIEHYGVVHHHVEQPQWMTSSIDRSPTLDVSCDGRGDDFESSSFSFPTETPMDSMHGGFGMQMSAPHEDGKWMQFLSEDAFNATNPFLTNPVSANFSCLPSKVDVALECARLQHRLTLPPLEVEDFPQDVSLDTKIGILRSNPNEVDILQEFLSVATASQELINGSTSSYPEMWLGASTSSASYVNELSSLVEMGGVGTSNHHESARLQVEIADMEVFKDDKKRVENLRGVKLVNNDLGEIVVEGDESNPTEDIIAQYPIKVTADNSGEAGHRMTDPTDVGGIDTAPIFSQSQPDDFAAGFDDVNPNASFDLYEKVDVNHRLFVSRVAAAKTFFHRIEPSKKVSFHSNPAATAVSKATEKFHFPVTTKVSGRVSIFSKFKALIRDKFLMMRPSHSYQRLGSKETTVNELLQIVSLLLAPEQINGCPTEQELVKKKAKEVMKPGWGREGSNKLWLPLSKGKGISSMFLSGKWTFLTSALAISTPAECDH

SEQ ID NO: 2868 - protein, 286 aa, Solanum lycopersicum
MSSEKEDGLGLSLSLGIMSCPQNNHKTTPSLPLNLLPFMHHHQVSSGRKDEGGERVRGGIDMNEPARMIIECDDEEDEEEDQVLMVSSPNSTVSSVSGKRSHDREENEGERATSSLEDDGGDAAARKKLRLSKEQAAVLEETFKEHNTLNPKQKLALSKQLNLRPRQVEVWFQNRRARTKLKQTEVDCEYLKRCCENLTDENRRLQKEVSELRALKLSPQFYMNMSPPTTLTMCPQCERVAVSSSSSSSSVVNATRAQNHQAPVPMNKPWAAMFASKTLDVQRSQM

SEQ ID NO: 2869 - protein, 313 aa, Brassica napus
MDKEKSPAAPCGGRLPPPSPSGRSSPFSDANRLSHDMSRMLEHPPKKIGHRRAHSEILTLPDDLSFDFDLGVVGGSADVPSFSDDTEGGDLMSMYLDMDKFNSSTATSSAAAQVGEPSWRNESVGMHTGLTSNPPRVRHQHSHSMDGSLNMSEMLVSGEGDDSVVDAKKSMSAAKLAELALIDPKRAKRIWANRQSAARSKERKTRYIFELERKVQTLQTEATTLSAQLTLLQRDANGLTVENNELKLRLQTMEQRVQLQDELNEALKEEIHHLKALTSQVAPNGASSGMNYGSFGSNQQFYSNNQTMLAAQQ

SEQ ID NO: 2870 - protein, 366 aa, Arabidopsis thaliana
MSQVRDTPVKLFGWTITPVSHDPYSSSSHVLPDSSSSSSSSSLSLRPHMMNNQSVTDNTSLKLSSNLNNESKETSENSDDQHSEITTITSEEEKTTELKKPDKILPCPRCNSADTKFCYYNNYNVNQPRHFCRKCQRYWTAGGSMRIVPVGSGRRKNKGWVSSDQYLHITSEDTDNYNSSSTKILSFESSDSLVTERPKHQSNEVKINAEPVSQEPNNFQGLLPPQASPVSPPWPYQYPPNPSFYHMPVYWGCAIPVWSTLDTSTCLGKRTRDETSHETVKESKNAFERTSLLLESQSIKNETSMATNNHVWYPVPMTREKTQEFSFFSNGAETKSSNNRFVPETYLNLQANPAAMARSMNFRESI

SEQ ID NO: 2871 - protein, 221 aa, Plantago major
MVRGKTQMRRIENATSRQVTFSKRRNGLLKKAFELSVLCDAEVALIIFSPRGKLYEFASSSLQDTIERYQSHIKELQAENPPLEQNTQQLQYETAGLLRKIEQLEAAKRKLLGEGIGACSLEELQQLETQLERSVTSIRTRKTQLYKQQIEQLKEKTKALAAENASICQKYGLQPQKGGGAKLSEERGNAASAEISEVSDVETDLFIGLPESRANKHSLQK

SEQ ID NO: 2872 - protein, 244 aa, Dendrocalamus latiflorus
MGRGKVQLKRIENKINRQVTFSKRRSGLLKKAHEISVLCDAEVGLIIFSTKGKLYEYATDSCMDKILERYERYSYAEKVLISAESETQGNWCHEYRKLKAKVETIQKCQKHLMGEDLESLNLKELQQLEQQLESSVKHIRSRKSQLMLESISELQKKEKSLQEENKVLQKELVEKQQVHKRLVQWDQTQPQTSSSSSSFMMREALPTTNISIYAAAAGERAEDAAGQPQIHIGLPPWMVSHING

SEQ ID NO: 2873 - protein, 589 aa, Glycine max
MDSEDDMHDANDVESLDDDFYSGETEDAPMDYYSDYDDEADDYFDDADDSDRVESRRPEQNFTILRELDIRQRQEDDIARVAAVLSIPRVSASILLRHYNWSVSKVHDAWFADEDQVRKTVGLLEKPVFQNSNTRELTCGICFEMYPRARVESTACGHPYCYSCWAGYFSTSINDGPGCLVLRCPDPSCGAAVGQDMINLLASDEDKQKYDRYLLRSYIEDNKKTKWCPAPGCEYAVTFDAGSGNYDVSCLCSYSFCWNCTEEAHRPVDCGTVAKWILKNSAESENMNWILANSKPCPKCKRPIEKNQGCMHMTCTPPCKFEFCWLCVGAWSDHGERTGGFYACNRYEAAKQEGVYDDTERRREMAKNSLERYTHYYERWASNQSSRQKALADLQQMQTVHIEKLSDIQCQPESQLKFITEAWLQIIECRRVLKWTYAYGFYLPEHEHAKKQFFEYLQGEAESGLERLHQCAEKELQPFLSADDPSREFNDFRTKLAGLTSVTRNYFENLVRALENGLSDVGSNGAAFSKATSSKNAAGSSKGRAGRGKGTFRTISSRMTDDNHWSCEHCTYANVKSATTCQMCNQQRR

SEQ ID NO: 2874 - protein, 244 aa, Dendrocalamus latiflorus
MGRGKVQLKRIENKINRQVTFSKRRSGLLKKAHEISVLCDAEVGLIIFSTKGKLYEYATDSCMDKILERYERYSYAEKVLISAESETQGNWCHEYRKLKAKVETIQKCQKHLMGEDPESLNLKELQQLEQQLESSVKHIRSRKSQLMLESISELQKKEKSLQEENKVLQKELVEKQQVHKRLVQWDQTQPQTSSSSSSFMMREALPTTNISIYAAAAGERAEDAAGQPQIHIGLPPWMVSHING

SEQ ID NO: 2875 - protein, 302 aa, Zea mays
MGCKACQKPKVQYRKGLWSPEEDEKLRDYILRYGHGCWSALPLKAGLQRNGKSCRLRWINYLRPGLKHGVFSREEEETVMSLHAKLGNKWSQIARHLPGRTDNEVKNYWNSYLKKRVEGGAQGKHGAADPATPGRSDVHGSPDDPSENNGQGSVVSRPANSDSSEPAVESSSADDSSCLTVTEPAGARASATAAVRPHAPVLPKVMFADWLDMDYGTSLVALGPDAGVFDVAGRSPGQGLSHQGSAQVDGPCGVVDSLHGLGVGVGVGGMCWEFDGAAAEQLDVQGGEFCDLLSMSEFLGIN

SEQ ID NO: 2876 - protein, 335 aa, Craterostigma plantagineum
MNQQQVVKVSKNKQINSEDDDDSSDLRRGPWTVDEDFTLINYIAHHGEGRWNSLARFAGLKRTGKSCRLRWLNYLRPDVRRGNITLEEQLLILELHSRWGNRWSKIAQHLPGRTDNEIKNYWRTRVQKHAKQLKCDVNSKQFKDTMRYLWMPRLVERIQRAATTDDGAPPLASSASSPSSAMNTACYSTAMAAGDHRRQFMLMPQYYAMTTHSNLMIAQENSSTVASSESFGSLSSELTEANYANYHQVINGADHQQIDSSTTTSYGWQNDFAINTVGNNGNSDQLGMGSVDDRRSNEQWMMMDDVDNGGSSDKDNNLLWNVDDVWFLQQFSSCF

SEQ ID NO: 2877 - protein, 255 aa, Arabidopsis thaliana
MERSSSYGVEKLQKRCYHEWMSLQTKHIDDLKEALMCQRNNDDKLEDLVGKIVNDYHTYAGKRSELSYRCCAHYFAPSWNTPIENSMLWMGGCRPSSFIRLIYALCGSQAETQLSQYLLKIDDDFDINHGGFMSDLTATQLGKLNDLHLEVIKKEDKITKTSANFQDDVADLPIADVVHADVAVEDALDKHEEGMAVLLAEADKLRFETLRKIVDVVTPLQAVEFLLAGKRLQLSLHDRGRVRADVCGGVGGAAV

SEQ ID NO: 2878 - protein, 488 aa, Retama raetam
MVEPSPTTGSFSKLLQTVHGSMPSAASATFPVTTACFNTNTVEERKSNIFEFKPHNKSNMVPADFKNHVSEQSIQAEGPGKAQSFASSPLIECEIDVPSNELSLSSPVQMVSSGASTPVEVDSDELNHKGNTITVLQASQVEEVKGSGLPVAPERASDDGYNWRKYGQKLVKGSEFPRSYYKCTHPNCEVKKLLECSHDGQITEIVYKGMHDHPKPQPSRRYSVSMQEERSGKASLAGRDAEPNSTPDLSSVATNDDSREGADRTNDEVDDDDPFSKRRKMELGFADITHVVKPIREPRVVVKTLSEVDILDDGYRWRKYGQKVVRGNPNPRSYYKCTNAGCPVRKHVERASHDPKAVITTYEGKHNHDVPAARNSSHDMAGPAGVVGGQTRIKLEESDSISLDRGMGISSAAENRSNGQGKMLLSEFGNSQTQTSNSNFKFVHTTAGPVYFGVNPYGSIENRSDGPSLNHASSYPCSQNIGRILTGP

SEQ ID NO: 2879 - protein, 201 aa, Thalictrum thalictroides
AGIVKKAQELTVLCDAEVSLLMVSSTGRIHEYVSPCSTHKNLYDRYQQASGTNLWQPHYERMQETMKKLKEINNKLRKEIRQRNGEDLDELNFQQLCGLEQNMEKSVEGVRNRKFHVITTSTDTYKKKIKNHEETHNSLRREFEEGDADFRFPSVDFEGDYQSTIGFANGNPQIFAVRWQPKLQSNIQDKEAYGSYGLSLV

SEQ ID NO: 2880 - protein, 203 aa, Clematis chiisanensis
NRLVTYSKRRTGIMKKARELTVLCDAEVSLIMFSCTGKLAEYTSPSTTPKKVYDQYQRVTRINLWKSYYEKLQESLKQQKEVNMKLHKEIGQRTGKESLDGVSFEKLHGLEQDLDGTLKVVRERKYHVIATQTETSKKKLKNKQEAHKRLVREIEARNEVAYYGGDFESIMAMSNGGAHLFSYHLQPNPQEVEAHGACDFHLA

SEQ ID NO: 2881 - protein, 509 aa, Arabidopsis thaliana
MENSDTDSEVFFWFQNQNQNHSHKFPSSCFPPSSHSAFYGSSSMINTETATMDEEDVCESYMMREITKKRKLTPIQLRLLEESFEEEKRLEPDRKLWLAEKLGLQPSQVAVWFQNRRARYKTKQLEHDCDSLKASYAKLKTDWDILFVQNQTLKSKVQFLNRLTSHYFQESVQNFDDTFKQVDLLKEKLKMQENLETQSIERKRLGEEGSSVKSDNTQYSEEEGLENQYSFPELAVLGFYYDPTLTASNLRQEPLKVTCADQMTQIQISDVTEPASSAHVNSCRSSSNDTRQYKKIEVTQRSSSMSRKRDKPYTNRHTPARISKRRRPWAPSSSEHDEIIDKPITKPPPPPALVVMGLPANCSVLELKSRFEIYGSISRIRIHKDGIGSVSYRTAESAEAAIAGSHEPSFGISIDSKKLEVVWATDPLVKWKEGVTAGEGKERTSSFSSKLLRPVMPLRKHGRSSRLASAIVNPRSDNTKGISGDGGISSPATTSEVKQRNIVTYDDIV

SEQ ID NO: 2882 - protein, 175 aa, Ashbya gossypii ATCC 10895
MPRQYSKDARTRNGEMGRYSVKRYKTKRRTKDLDLIFEDLASEQRVNALLKQPLDETKPGLGQHYCIHCAKYFETPAALKTHLKGKVHKRRVKELRGVPYTQEVANAAAGTDVGRFMARVEQIKTSVGPQKERNEAALAAQLETALENAATREAPLPHCASAEAGFMADGEVEMN

SEQ ID NO: 2883 - protein, 272 aa, Plantago major
LKDPQFSRILYLRSNVDLKDKWRNMSVLANGWGNRERARLALRTAHSSHRLRESSRPHSTGSQSDDEIGDGRMHTASGSSSPNDGEKTSVVRLENLILEAINDLREPGGSNKTSIAVYIEDQYWAPPNFKRILSAKLKQMAAMGKLIKMNRKYRISLASALSEGRRNSSIPIPAERQRIYQRTGGHNLGHYMEIQSDLDLAKMSNMTPEEAAAAADEAVAEAEAAVAEAEEAEREAVAAEAEAEAAQKFAEAALKTAKEKRSPPMSARMIPV

SEQ ID NO: 2884 - protein, 55 aa, Solanum lycopersicum
IKGSPHPRGYYKCSSMRGCPARKHVERCLEEPSMLIVTYEGEHNHPRLPSQSANA

SEQ ID NO: 2885 - protein, 212 aa, Plantago major
VKSAFNLSLSGSYYTLLPSFLLLFSSPFFLSCSIFYHRSLHYLLLEMKTGGRSKAAVRKETLKPVDDRKVGKRKAAAAPKVKKPAAKKDKKAKKDPNKPKRPPSAFFVFLEEFRQTFKKENPNIKAVSAVGKAGGEKWKSLTDAEKAPYEAKAAKRKSEYEKLMNAYNKKQESSADEADEGSEKSRSEVHDDEEDSVQEEEDEDEDDDEDDD

SEQ ID NO: 2886 - protein, 224 aa, Gossypium hirsutum
MGRGKIEIKRIENTTNRQVTFCKRRNGLLKKAYELSVLCDAEVALIVFSTRGRLYEYSNNNIRSTIERYKKACSGTSNTNTVTEINAQYYQQESAKLRQQIQMLQNSSRHLMGDSLSSLTVKELKQLENRLERGITRIRSKKHEMLLAEIEYFQKREVELENESVCLRAKIAEIERVEEANMVTGAELNAIQALASRNFFTPNVIERGTPTPYSHHDKKILHLG

SEQ ID NO: 2887 - protein, 60 aa, Solanum lycopersicum
IKGSPHPRGYYKCSSVRVCPARKHVERALDDPTMLIVTYEGEHNHSLSVAETSSLILESS

SEQ ID NO: 2888 - protein, 161 aa, Plantago major
SNKSMAGQVSLSGPASAKASADDNGSANLSEKPRIRHQHSQSMDGSTSIKSEMFMSGSEDPSSVESKKAMSAAKLAELALIDPKRAKRVWANRQSAARSKERKMRYIAELERKLQTLQTEATTLSAQMTLLHEAQMLLHRKMVNLNCVCRQWNSKYTCKML

SEQ ID NO: 2889 - protein, 55 aa, Solanum lycopersicum
IKGSPHPRGYYKCSSMRGCPARKHVERCLEDASMLIVTYEGEHNHPRLPSQLANT

SEQ ID NO: 2890 - protein, 234 aa, Gossypium hirsutum
MEFPNLDPESSSQKKMGRGKIEIKRIENTTNRQVTFCKRRNGLLKKAYELSVLCDAEVALIVFSSRGRLYEYANNSVRATIERYKKACSDATTPGSVAEANIQFYQQEATKLRRQIRDVQNMNRHILGEALSSLTFKELKNLEGRLEKGICRIRSKKNELLFAEIGFMQKREVELQNDNMYLRAKIAENERAQQQSNQLMQAASSYNRNFLPVNLLEPSNNDYSNQDQTPLQLV

SEQ ID NO: 2891 - protein, 219 aa, Syringa vulgaris
KRIENQTNRQVTYSKRRNGLFKKAHELTVLCDAKVSIIMISSTQKIHEYISPTSSTKQLFDLYQTTVGVDLWITHYERMQEHLRKLKDINKNLRREIRQRMGESLNDLNYDQIVSLIEDVDDSLRKIRERKYKVIGNQIETSKKKLRNVEEIHRNILLEFDARQEDPQYGLVDNEGDYNSVLGFPNGGPRIIALRLPSNHHPNLHSGGGSDLTTFALLE

SEQ ID NO: 2892 - protein, 232 aa, Malus x domestica
MGRGKIEIKLIENQTNRQVTYSKRRNGIFKKAQELTVLCDAKVSLIMLSNTNKMHEYISPTTTTKSMYDDYQKTMGIDLWRTHEESMKDTLWKLKEINNKLRREIRQRLGHDLNGLSFDELASLDDEMQSSLDAIRQRKYHVIKTQTETTKKKVKNLEQRRGNMLHGYFDQEAAGEDPQYGYEDNEGDYESALALSNGANNLYTFHLHHRNLHHGGSSLGSSITHLHDLRLA

SEQ ID NO: 2893 - protein, 219 aa, Chelone glabra
KRIENQTNRQVTYSKRRNGLFKKANELSVLCDAKVSIIMISSTQKLHEYISPTTTTKQLLDQYQKAVGVDIWNSHYEKMQEHLKKLKDVNRNLRREIRQRMGESLNDLGYEELVNLIEDVDSSLSLIRERKYKVIGNQIETSKKKVRNVEEIHRSLVLEFDATHYGLIENEGDYNSILGFPNRGQRIIALRLPTHPDDHHPSLHSGGGGSDLTTFALLD

SEQ ID NO: 2894 - protein, 242 aa, Malus x domestica
MEFANQAPESSTQKKLGRGKIEIKRIENTTNRQVTFCKRRNGLLKKAYELSVLCDAEVALIVFSTRGRLYEYANNSVRATIDRYKKACADSTDGGSVSEANTQFYQQEASKLRRQIREIQNSNRHILGESLSTLKVKELKNLEGRLEKGISRIRSKKNEILFSEIEFMQKRETELQHHNNFLRAKIAESEREQQQQQTHMIPGTSYDPSMPSNSYDRNFFPVILESNNNHYPRQGQTALQLV

SEQ ID NO: 2895 - protein, 248 aa, Solanum tuberosum
MENSVPRTVEEVFSDFKSRRAALIKALTTDVEKFYQQCDPEKENLCLYGLPNETWEVNLPVEEVPPELPEPALGINFARDGMQEKDWLSLVAVHSDSWLLSVAFYFGARFGFGKSERKRLFQMINDLPTVFEVVTGAAKQTRDPPHNNSNKSKSSGKPRQPESQLKAVKVSPPKMENDSGEEEEEEEDEQGATLCGACGDNYATDEFWICCDICERWFHGKCVKITPAKAEHIKQYKCPSCSSKRAKV

SEQ ID NO: 2896 - protein, 226 aa, Verbena officinalis
KKIENQTNRQVTYSKRRNGLFKKAHELTVLCDAKVSIIMISSTQKLHEYISPSTATKQVFDQYQKAVGVDLWQSHYEKMQEHLKKLKEVNRNLRKEIRQRMGESLNDLGYDHMVNLIEDMDNSLRLIRERKYKVIGNQIETSKKKLRNVEEIHRNLVLEFDARQEDPHYALVENEGDYNSVIGYPNGGGGPRIIALRLPQPIHHHLPHPALHSGGGSDLTTFHLLE

SEQ ID NO: 2897 - protein, 252 aa, Arabidopsis thaliana
MKSGADLQFPPGFRFHPTDEELVLMYLCRNCASQPIPAPIITELDLYRYDPWDLPDMALYGEKEWYFFSPRDRKYPNGSRPNRAAGTGYWKATGADKPIGRPKPVGIKKALVFYSGKPPNGEKTNWIMHEYRLADVDRSVLKKNSLRLDDWVLCRIYNKKGVIEKRRSDIEDGLKPVTDTCPPESVARLISGSEQAVSPEFTCSNGRLSNALDFPFNYVDAIADNEIVSRLLGGNQMWSTTLDPLVVRQGTF

SEQ ID NO: 2898 - protein, 85 aa, Oryza sativa (japonica cultivar-group)
MASMSVSSSRAPQWTARQNEQFERALAVYDRDTPERWHNIARAVAGKSADEVKLYYDLLVEDVKRIETGKVPFPAYRCPQPAIAG

SEQ ID NO: 2899 - protein, 147 aa, Triticum aestivum
EALEPGKPVKSDKAAILSDATRMVIQLRAEAKQLKDTNESLEDKIKELKAEKDELRDEKQKLKVEKETLEQQVKILTATPAYMPHPTLMPAPYPQAPLAPFHHAQGQAAGQKLMMPFVGYPGYPMWQFMPPSEVDTSKDSEACPPVA

SEQ ID NO: 2900 - protein, 278 aa, Triticum aestivum
MSDSSSTASSSPSPSSTSPRLTTGDVNFLARRAVTTQQNHHQAAAEAFPLHSPGSSTGSADSAPWHHRAPATPPPVLPFDTSDADEMLLLDMVSQHHEVQHAAASPTTAPAVKQEADEEDKVVLGVARAFRGVRKRPWGKFAAEIRDSTRNGVRVWLGTFDSPEAAALAYDQAALAIRGGAAVLNFPADQVRRSLEGAADDLCGCTNGVSPVLALKQRHCIRSRKATTMSRKAKAARGQPEGMVMELEDLGAEYLEQLLGTSQEMASMDSWCWSHHSI

SEQ ID NO: 2901 - protein, 200 aa, Fraxinus excelsior
GKWWEVFKEKQLKQLQKSHNSRQEYDNPVAGSAVAGGGSPEKAVQGKYDHILETFAEKYVQPKMFAFQSPNIIIPPNLPLPEPPPVLSIGSSEPVQLSGPILPPWMNNTTHTHTQTSSSLTSSSSSTHSPSVSLTLSPSEPAVLDPIHPEPGLPTRFLPIKQMNTLIQYCKELEEGRQIWLHHKKEATWRLTRLEQQLES

SEQ ID NO: 2902 - protein, 200 aa, Fraxinus excelsior
GKWWEVFKEKQLKQLQKSHNSRQEYDNPVAGSAVAGGGSPEKAVQGKYDHILETFAEKYVQPKMFAFQSPNIIIPPNLPLPEPPPVLSIGSSEPVQLSGPILPPWMNNTTHTHTQTSSSLTSSSSSTHSPSVSLTLSPSEPAVLDPIHPEPGLPTRFLPIKQMSTLIQYCKELEEGRQIWLHHKKEATWRLTRLEQQLES

SEQ ID NO: 2903 - protein, 236 aa, Arabidopsis thaliana
MPTLYKKAGSMVSPENTNWLSDYPLIEGAFSDQNPTFPWQIDGSATVSVEVDGFLCDADVIKEPSSRKRIKTESCTGSNSKACREKQRRDRLNDKFTELSSVLEPGRTPKTDKVAIINDAIRMVNQARDEAQKLKDLNSSLQEKIKELKDEKNELRDEKQKLKVEKERIDQQLKAIKTQPQPQPCFLPNPQTLSQAQAPGSKLVPFTTYPGFAMWQFMPPAAVDTSQDHVLRPPVA

SEQ ID NO: 2904 - protein, 277 aa, Arabidopsis thaliana
METLHPLLSHVPTSDHRFVVQEMMCLQSSSWTKEENKKFERALAVYADDTPDRWFKVAAMIPGKTISDVMRQYSKLEEDLFDIEAGLVPIPGYRSVTPCGFDQVVSPRDFDAYRKLPNGARGFDQDRRKGVPWTEEEHRRFLLGLLKYGKGDWRNISRNFVGSKTPTQVASHAQKYYQRQLSGAKDKRRPSIHDITTVNLLNANLSRPSSDHGCLVSKQAEPKLGFTDRDNAEEGVMFLGQNLSSVFSSYDPAIKFSGANVYGEGGYCISQDLETRK

SEQ ID NO: 2905 - protein, 292 aa, Triticum aestivum
NGALLSGDRQQGDTESSHGVDASSKELSKPECSGGAGQDEGPSVSCPKKRKRPSQDRGVKHVQEGSQQLATLAAKREKDDDDKDEPKRPVGTSRKSNGKQTEDKSDAPKEDYIHIRARSGQATNSHSLAERVRREKISERMKFLQDLVPGCSKVIGKAVMLDEIINYVQSLQRQVEFLSMKLSAVNPALDFNIERILSKDLFQSQGTASSTFGFLPDIGHQFLHPPKHSQAALHSIVNPADAFGRVTNAPVGCTFKEATHQVSNNFDGEFHNVIGMPFTLFNDQGIHMGNLE

SEQ ID NO: 2906 - protein, 183 aa, Glycine max
MELALSLGDTPKPFSLPAKNDSVSFKIALGDDKRVSSDPPVQLDLLPSTPVLPSSRLRIPWLSDALGMERVTSEIPVRAVDDTDDGAALSSPNSAVSSFQMDFCFRNSRKSCEGASDEDDENGSTRKKLRLSKQQSVFLEESFKEHTTLNPKQKLALAKQLNLRPRQVEVWFQNRRARTKLKQ

SEQ ID NO: 2907 - protein, 301 aa, Solanum tuberosum
MNKGATGNQQLELPAGFRFHPTDDELVQHYLCRKCAGQPIAVSIITEIDLYKFDPWQLPEKALYGEKEWYFFSPRDRKYPNGSRPNRAAGTGYWKATGADKPVGKPKTLGIKKALVFYAGKAPRGIKTNWIMHEYRLANVDRSAGKNNNLRLDDWVLCRIYNKKGTLEKHYNVDNKETASFGEFDEEIKPKILPTQLAQMPPRPRSTPTNDYFHFESSESMTRMHTTNSSSGSEHVLSPCDKEVQSAPKWDEDHRNTLDFQLNYLDGLLNEPFETQMQQQSCNFDQFNNFQDMFFYMQKPY

SEQ ID NO: 2908 - protein, 303 aa, Arabidopsis thaliana
MEKMIEPRDNTRESEDEDALKLPGFRFHPTDEELVGYYLSKKVLLKKTSKIDEIVSQIDIYKFDPWDLPRSRNTEKESYFFCKRGRKYRNSIRPNRVTGSGFWKATGIDKPVYSDGSNKAVIGLKKTLVYYLGSAGKGNKTDWMMHEFRLPTANDTIPGGPTHSNPTPTSLLHAEVWTLCRIFKRTVSSRKYTPDWRELANGKRVKQQQSNYQEAYINFGDNESSSSTNVMNVREGKGNYERSVFQLQQTPYQHQNQPILMDTTHVDSFQHFSNDNIHHETYETWPDELRSVVEFAFPPSFLS

SEQ ID NO: 2909 - protein, 219 aa, Pedicularis groenlandica
KRIENQTNRQVTYSKRRNGLFKKAHELTVLCDAKVSIIMISSTQKLHEYISPSTMTKQVFDQYQKAVGVDLWKTHYEKMQGHLQKLKDVNRNLRKEIRQRMGECLNDLGYEQMVNLIEDIDNSLRLIRERKYKVIGNQIETGKKKLRNVEEIHRNLVLEFDAREEDPHYGLVENEGDYNSVLGYPNGGSRIIALRLPHHHPGLHSGGAASDLTTFALLE

SEQ ID NO: 2910 - protein, 214 aa, Paulownia tomentosa
YSKRRNGLFKTAHELTVLCDAKVSIIMISSTQKLHEYISPTTMTKQVFDQYQKAVGVDLWSSHYEKMQEHLQKLKEVNRNLRREIRQRMGESLNDLGYDQMVNLIEDMDSSLRLIRERKYKVIGNQIETSKKKLRNVEEIHRNLVLEIDARQEDPHYGLVENEGDYNSVLGFPNGGPRIIALRLPPNHHHHHHHHPSLHSGGAASDLTTFALLE

SEQ ID NO: 2911 - protein, 287 aa, Nicotiana glauca x Nicotiana langsdorffii
MASSLMKRNGVEKNDKTFHEFFETWLAEQKQELKELVSASRDVSKGNNNVVEERVLVPLIKRVIQHYEGYYEEKSKYTEEDVFGMLNPTWRSNLEGAFLWIGGWRPSMAFHLLYSKSGLQFEARLPQLIRGITTGDLGYLSPDQIDKVDELQKKTIREEKKSSEKLARVQETVADASMVELSHIVTQLMMISGSRGGGGGGGKILDEEVEANLATKEEGLIIILQKADNLRLNTLKEILAILTPTQAIHFLIAAAELHLRLHEWGKIEDATASRTPARRYYHHHHQL

SEQ ID NO: 2912 - protein, 298 aa, Solanum tuberosum
MCGGAILYDIIPRDRRLSSTDLWPSSADFWQTSSFSKPISTQNVPPKPKRAQLSRGSEQMKKRQRKNLYRGIRQRPWGKWAAEIRDPRKRVRVWLGTFNTAEAARAYDREARKIRGKKAKVNFPNEDDDHYYSHPEPPPLNIVYESYDTTSTYNQESNNCYPFHSIENTEPVMEFAIANKNSSGSAYNGIEDQNVEGEEQTVKNSNNRIVEEEEKTEDEVQILSDELMAYESLMKFYEIPYVDGQSVAATVNPAADTEVGGGSMELWSFDDVSRLQPSYNVSLIIVLFKLLHLFSLLN

SEQ ID NO: 2913 - protein, 100 aa, Arabidopsis thaliana
QLPEKKRRLTTEQVHLLEKSFETENKLEPERKTQLAKKLGLQPRQVAVWFQNRRARWKTKQLERDYDLLKSTYDQLLSNYDSIVMDNDKLRSEVTSLTEK

SEQ ID NO: 2914 - protein, 184 aa, Glycine max
MTRALRYLGERNSSTDSAVVDSDFVVILAALLCALICVLGLVAVARCGCLRRLRLSSSATTPQSPTSAANKGVKKKVLRSLPKLTATAESAVKFADCAICLTEFAAGDEIRVLPQCGHGFHVSCIDAWLRSHSSCPSCRQILVVSRCDKCGGIPAPASSSSDPPPPDSEARFKGREDDANRFLP

SEQ ID NO: 2915 - protein, 56 aa, Arabidopsis thaliana
QVEVWFQNRRARTKLKQTEVDCEFLKKCCETLTDENRRLQKELQDLKALKLSQPFS

SEQ ID NO: 2916 - protein, 327 aa, Brassica oleracea
MTRRCSHCNHNGHNSRTCPSRGVMLFGVRLTGGSIRKSASMGNLLSHGHGSGSPGAVPDHVAGDGYTSEGFVAGSSSSRERKKGAIWTEEEHRMYLLGLEKLGKGDWRGISRKYVRTRTPTQVASHAQKHFMRLSDVSRRKRRSSLFDMIPHEGGDTPLDLQAPKAENTRVETKMQRGDSVHQKFARNSIHATPIFKIEESESMDSTNSTIKEPTPPTTQLRSQPQPQRPGSYPVLYPGYFSPYYPFPFPVWSAGYVLEPAKKEETHEILRPTAVHSKAPFNVNGLLGMTTKLSLGEPKENGESDQSLSLKLGGGSETRQSPLHPNA

SEQ ID NO: 2917 - protein, 225 aa, Verbena officinalis
KKIENQTNRQVTYSKRRNGLFKKAHELTVLCDAKVSILMISSTQKLHEYISPPATTKQLFDNYQKAVGVDLWQTHYEKMQEHLRKLKEVNRNLRREIRQRMGESLNDMGYDHMVNLIEDMDNSLRLIRDRKYKVIGNQIDTSKKKLRNVEEIHKNLVLEFDARQEDPHYGLVENEGDYNSVLGFPNGGPRIIALRLPPNHHLNHHPNHLHGGGGSDLTTFHLLDQ

SEQ ID NO: 2918 - protein, 348 aa, Oryza sativa (japonica cultivar-group)
MASEDGCGGGNPPGDAAAAPPVWNAAPAAGAGCGDLEEDLRFQCCVCLELLYKPVVIEDEKRVDTYSPQIIEFLNSKSNNCEIDGENRPEESNSRPPQEVTSDGNTINGHPKKVKLEDVSCALCKELLYQPAVLNCGHVYCMSCLSSLDDGALKCQVCGGLHPGDFPNVCLDLDHFIEDYFPAEYDLRREKIKLLKGECNQGSSSGTSCIKEGRGRPTNKENRAHQDDDLSDVHIGVGCDSCGMYPIRGKRYKCKDCTELIGFDLCEECYNTKSKLPGRFNQHHTPDHRMELDHSALFNRLMRLQGIHEEGPGEIIIEGAFVAPDAVVHIIADDHEEIEDNGEDDHLL

SEQ ID NO: 2919 - protein, 254 aa, Brassica napus
MTEGEEYCLARMSVDPFMAMKKSNYNKNNQRRFSDEQIKSLEMMFESETKLEPRKKVQLARELGLQPRQVAIWFQNKRARWKSKQLETEFNILKQNYNDLASQFESLKKEKQALVSELHRLNEEVQKTHEEKRLCCGDQAAVVALSSTDHESENEENTRREQEEEVRPEMEVCEKGDDGVLCGHHNDDYDDGGYNNDIKREYFGGFEEEADHLMNIVEPADSCLTSSDDWGGFKSNANLLDQSSSNFPWWDFWS

SEQ ID NO: 2920 - protein, 248 aa, Brassica oleracea
MGKEDLGLSLSLGFSQHNNPSSSISNNLHRFPWNQTLASTSDLRKIQVNTLPSTVDCEEEAGVSSPNSTISSTISGGKRSEREGTDEEEDAGGETSRKKLRLSKDQSAFLEETFKEHNTLNPKQKLALAKKLSMTARQVEVWFQNRRARTKLKQTEVDCEYLKRCVEKLTEENRRLQKEAMELRTLKLSPQFYGQMTPPTTLIMCPSCERVAGPSSNHHQTHRPVAINPWVPRAGQVAHGLDFEALRS

SEQ ID NO: 2921 - protein, 157 aa, Triticum aestivum
  misc_feature (76)..(76): Xaa can be any naturally occurring amino acid
RRKTSLHTSALQGSFPLGAETLAAAADDREQAQMGGKCPHRKVKKRRLNCKQVRRGKFLVKADDAVYDELVKLADXGKDSEGKALPVDEDLPGMGQFYCLHCDRYFADETVKEDHYRSKRHKKRVKQLSGPAPHTQIDADLAGGMGMPDNGLKLMSS

SEQ ID NO: 2922 - protein, 240 aa, Brassica oleracea
MYGQGEIMAATETEYAVLESIRRHLLGGETELQFSESIPSSCFTESWGDLPLKENDSEDMLVYGVLNDAFNRAACETSSPSSDLSCLSDFLDKPPANPSHNDFPAVKMEPAENLAAVAEKPKEVAPPAKGKHYRGVRQRPWGKFAAEIRDPAKFGARVWLGTFEKAEDAALAYDRAAFRMRGSRALLNFPWRVNSGEPDPVRIPSKRSYTSSSSSDNGTPKRRRNTEEVPSELQVKCEVA

SEQ ID NO: 2923 - protein, 114 aa, Zea mays
  misc_feature (87)..(87): Xaa can be any naturally occurring amino acid
VSKWILKNSAESENMNWILANSKPCPKCKRPIEKNQGCMHITCTPPCKFEFCWLCLGPWSEHGERTGGFYACNRYESARQEGVYDEXERRREMAKNSLERYTHYYERWAANQSS

SEQ ID NO: 2924 - protein, 350 aa, Nicotiana tabacum
MAVELMTSGYSRRDSFSTKMEENAVQEAATAGLQSVEKLIRLLSQSHQNQQQQQQKLDQNPSVSADYTAVADVAVNKFKKFISLLDKNRTGHARFRKGPISTPLPPPPKPQQQRLNQNSIKNQNLQIEETEKPQINTPKIYCPTPIQRLPPLPHNHLQLVKNGSIERKESSTTINFASASPANSFMSSLTGETESLQQSLSSGFQITNLSTVSSAGRPPLSTSSFKRKCSSMDDTALKCNSAGGSSGRCHCPKKRKSRVKRVVRVPAISMKMADIPPDDYSWRKYGQKPIKGSPHPRGYYKCSSVRGCPARKHVERALDDPTMLIVTYEGEHNHSHSITESPAAHVLESS

SEQ ID NO: 2925 - protein, 301 aa, Streptomyces coelicolor A3(2)
MIGEIPGVAAGQPYNSRRLAHEAGVHRPLQAGICGTKATGAESIVVSGGYKDDEDYGDVIIYTGHGGRDSAGNQVSDQSLDDSGNAALVTSYLRGLPVRVIRGSQSGSPFAPSNGYRYDGLYRVASYTSKLGIDGFLIWQFRMEAYEETPTPKITKVRALFAEPTDCAKQDPVAASGTEQPERVTSMVQRIVRSSAIADTVKAWHQDQCQTCGIHIEVPGGFYSEGAHIQALGRPHNGPDRTDNMLCLCPNCHVMLDAGAIVLSDDLIVSKNGQLVGPLRTHPKHKVNIECVRRHRERWRQ

SEQ ID NO: 2926 - protein, 241 aa, Solanum lycopersicum
MGRGRVELKRIENKINRQVTFAKRRNGLLKKAYELSVLCDAEVALIIFSNRGKLYEFCSSSSMLKTLERYQKCNYGAPEPNISTREALEISSQQEYLKLKGRYEALQRSQRNLLGEDLGPLNSKELESLERQLDMSLKQIRSTRTQLMLDQLTDYQRKEHALNEANRTLKQRLMEGSQLNLQWQPNAQDVGYGRQTTQTQGDGFFHPLDCEPTLQIGYQNDPITVGGAGPSVNNYMAGWLP

SEQ ID NO: 2927 - protein, 381 aa, Manihot esculenta
MCGGAIISDFIPATAAGRSSRRLTADFLWPDLKKPIGKIVGDLDDDFEADFQEFKDESDVDEEDDVLFDVKPFSFSATASPPPRNRSPSRGSTAVKSVEFNGLAEKSAKRKRKNQYRGIRQRPWGKWAAEIRDPRKGVRVWLGTFNTAEEAARAYDAEARRIRGKKAKVNFPDEAPRASPKRTMKANPQKPLPKRNATESMSYLNNPDQDYFNTLGSVDEKPLVSQFDLMDSFPANGDATVKSIPPCDNVPTFFNSDQGSNSFECSDFGWGEQASKTPEISSVLSATPEIDESLFMDDANPKKKMKSDSENAVPIEESNGKSLSEELLAFDNQMNFQMPYLEGSWEASLDGFLNGDVTQDGGNPMDLWSFDDLPNMVGGVY

SEQ ID NO: 2928 - protein, 126 aa, Brassica napus
MDPYFVQSPFSAFSPEYSPESFSSSSSNNYSLPFNENDSEEMLLYGLIEQSTQQNVPVKTEEETGTSRKPEKSYRGVRRRPWGKFAAEIRDSTRNGIRVWLGTFESAEEAALAYDQAAFSMRGSSA

SEQ ID NO: 2929 - protein, 230 aa, Zea mays
MTSRLESGGFQLPNTEQENALLLRALISVVSGDTASASLVPEAAAAEAPAAAASACGCPGGCELAAASSSDSDGAECSASGGGAGKRRRRRSRASSYMGVRRRPWGKWAAEIRDPRRAARKWLGTFDTAEDAARAYDAAAVELRGRRAKLNFPDAAAAAAARDVQPRRPLPGQSLRENCGSNAASPLHVAVARAPTTLQGTGPAPPKDQDIWDGLNEIMTMDDGSFWSMP

SEQ ID NO: 2930 - protein, 336 aa, Medicago truncatula
MTKWCPAPGCEHAVNFVAGGENYDVSCLCSYSFCWNCTEDAHRPVDCGTVSKWILKNSSESENTNWILANSKPCPKCKRPIEKNLGCMHMTCTPPCKFEFCWLCLGAWSDHGSSTGGYDACNRYENSKLKGDYDETEKRREMAKNLLERYTHYYERWASNQSSRQKALADLHQMQTVHIEKLRDAQCQAEAELKFITEAWLQIVECRRVLKWTYAYGYYLAEHEHAKKQFFEYLQGEAESSLERLHQCAEKELQVFLSTEDPSKEFNDFRSKLAGLTGVTKNFFKNLVSALENGLCDVDSNGAATSKATSLKKMSQGAVREEVEEERGQIELQCPA

SEQ ID NO: 2931 - protein, 375 aa, Oryza sativa (japonica cultivar-group)
MEEEKRLERIIKEIDSPISPGGGAALLAEDDDLVFPGFRFHPTDQELVGFYLTRKVEKKPFSIDIIKEIDIYKHDPWDLPKVSHGAVALQGSSSSSSLSTAAAAEKECGYFFCLRGRKYRNSIRPNRVTGSGFWKATGIDKPIYSSSLAAAAAAAGAGDCIGLKKSLVYYRGSAGKGTKTDWMMHEFRLPSSISDSDHLQDASETWTICRIFKRSMTYTKGRAAAAAASMNKRISHELQHIHHHQQQQFYYHEVVHDGHGHHHRRHLQHYAGSASMAAAAANIVDVIDHSSDAETTTRSHSHSQSHLVADIRHRQSPFMLDFHAGTASSSSSTAAGWSEVMSFSRDGGSSSGSSWDELGRIMDISTNSANNNYYL

SEQ ID NO: 2932 - protein, 320 aa, Oryza sativa
MAASSEVSIDPDQWFYIYSLERVAYVCERVGSPVMEEAELRRRRRKRPFLTTTHDELELQMEDLVDELYGVDEQGSSSAAARKRRLTAEQVRALERSFEEEKRKLEPERKSELARRLGIAPRQVAVWFQNRRARWKTKQLELDFDRLRAAHDELLAGRTALAADNESLRSQVILLTEKLQANGKSPSPSPAPAEQTAVPAAPESAKSFQLEEGRRLYDAAGSTTTTNGGGGGVAMPAARVAAARAASNDSPESYFAGARSPPSSSEDDCGGAGSDDDYPSSSVLLPVDATLVGDAFEHAVAATVAADEEAPLNSWEWFWN

SEQ ID NO: 2933 - protein, 367 aa, Medicago truncatula
MGAPKQKWTAEEEAALKAGVVKHGAGKWRTILMDPEFSSILRTRSNVDLKDKWRNINVTAIWGSRQKAKLALKNSPPAPKTDNNQLALGKVVQREDFLDIKPLTISGGTFQSPKPLTICSGTLQSPNSKEQVSRLGDNNVLEAIVNMKEPKGSDKAAIASYIEEKYQCPPNLRKLLSAKLQQMVTSGKIVQEKHKYKIMPSSAVSEKRGSSSLMLVEARSKDSPEVEKMCDVNILSKSQIEAELSKVRGMSAQEAAAAAAKAVAEAEVAIAQAEAAAREAEIAEAEAEAAQVFAKAAMKALKCKMLHICVCELCRCRGFSLVDHWPSWLEIMVLLLRLLPILFVDVHNFRLVNLEYAERFMKHFIRS

SEQ ID NO: 2934 - protein, 341 aa, Tripsacum cundinamarcae
PSVKHMFPFCDSSSPMDLPLYQQLQLSPSSPKTDQSSSFYCYPCSPPFAAADASFHLSYQIGSAADATPPQAVINSPDLPVQALMEHAPAPATELGACASGAEGAGGSLDRAAAAARKDRHSKICTAGGMRDRRMRLSLDVARKFFALQDMLGFDKASKTVQWLLNTSKAAIQEIMADDASSECVEDGSSSLSVDGKHNPAEQLGGGDQKPKGNCRSEGKKPAKASKAGKSANNAHPVPDKETRAKARERARERTKEKHRMRWVKLASAIDVEAAAASVPSDRPSSNNLSHHSSLSMNMPCAAAELEPEERERCSSALNTRGRMQEITGPSDVVLGFGNGG

SEQ ID NO: 2935 - protein, 317 aa, Zea mays subsp. mexicana
LGVPSVKHMFPFCDSSSPMDLPLYQQLQLSPSSPKTDQSSSFYCYPCSPPFAAADASFPLSYQIGSAAAADATPPQAVISSPDLPVQALMDHAPAPATELGACASGAEGSGASLDRAAAAARKDRHSKICTAGGMRDRRMRLSLDVARKFFALQDMLGFDKASKTVQWLLNTSKSAIQEIMADDASSECVEDGSSSLSVDGKHNPAEQLGGGGDQKPKGNCRGEGKKPAKASKAAATPKPPRKSANNAHQVPDKETRAKARERARERTKEKHRMRWVKLASAIDVEAAAASGPSDRPSSNNLSHHSSLSMNMPCAAA

SEQ ID NO: 2936 - protein, 233 aa, Zea mays
  misc_feature (108)..(108): Xaa can be any naturally occurring amino acid
MMAEAWTPVLLPATAPCFWQQDTHSVLWRRGDAWTAEENKLFEKALAQIDRNAPDRWEKVAAVLPWKTVDDVRSQYHALEKDVGVIEAGGLVPFPRYSGSVPPPSGFXSRTGGGGDRGFRRARGSEEMQERKKGVPWTEEEHKLFLMGLRKYGRGDWRNISRKYVTTRTPTQVASHAQKYFIRLSSGGKDKRRSSIHDITTVNLPGDAPRSSPPAATTNPSAGALVVDVKPFV

SEQ ID NO: 2937 - protein, 217 aa, Pedicularis groenlandica
KRIENQTNRQVTYSKRRNGLFKKAHELTVLCDAKVSILMISSTQKLHEYISPAIMTKQLFDQYQKDVGVDLWNSQYEKMQEHLKKLKEVNRNLRREIRQRIGESSNDLGYDQIVNLIEDIESSLSLIRERKYKVIGGQIDTSKKKLRNVEEIHRNLALEYDVRQEDPHYGLVENEGDYNSVLGFPNGGTRIIALRLPPPNLHGGGGASDLTTFALLE

SEQ ID NO: 2938 - protein, 358 aa, Andropogon gerardii
PSVKHMFPFCDSSSPMDLPLYQQLQLSPLSPKPDQSSSFNCYPCSPLFAAAAADASFHLTYQIGSAAATTPPQAVIDSPELPVQPLMEQAPAPATEQGACNSGAQGAGVSVSLERAAAAARKDRHSKICTAGGMRDRRMRLSLDVARKFFALQDMLGFDKASKTVQWLLHTSKAAIQEIMADDVDASSECVEDGSSSLSVDGKHNPAEQLGGGDQKPKGNGRSEGKKPTKSRKAATTPKPPRKSSNNAHPVPDKETRAKARERARERTKEKHRMRWVKLASAIDVEAAAASVASDRPSSNHLNHHHHHSSSSSMNMPRAAAAESEERERCSSALNNRGRMQEITGASDVVLGCFGNGG

SEQ ID NO: 2939 - protein, 219 aa, Paulownia tomentosa
KRIENQTNRQVTYSKRRNGLFKKAHELTVLCDAKVSILMISSTQKLHEYISPNTTTKQLFDQYQKAVGVDLWNSHYMKMQEHLKKLNEVNRNLRMEVRQRVGESLNDLGYDQTVNLIEDIENSLKLIRERKYKVIGNQIDTSKKKLRNVEEIHRTLLLEFDARQEDPHYGLVENEGDYNSVLGFPNGGPRIIALRLPPNHHPSLHSGGGSDLTTFALLE

SEQ ID NO: 2940 - protein, 327 aa, Glycine max
MSKDIANMKDSWFFDNNFNGLSDEIFDDVINFFDFPLEDVDANGVEEDWDAQLKCLEDPRFDVYSASSAGLCAETQNEKPQLGMKLSASSNGISPIKQLAKAPGPAYGKTIPHQNVTSNGKDLHQFQTYTYSPVSVFESSSSSSVENSNFDRPVIPVKRARSKRQRPSNFSPLFSIPLIVNLPAVRKDQRTAASDSDFGTNVAGNLSNKVKKQRKKDLSLLSDDVEMTRSSSPESGPPRKCMHCEVTKTPQWREGPMGPKTLCNACGVRYRSGRLFPEYRPAASPTFVASLHSNCHKKVVEMRSRVIQEPVRCSMLASSNLHGNSVG

SEQ ID NO: 2941 - protein, 218 aa, Brassica oleracea
MWMMISQEGQRSNPIIYHNNIHLLCEVDQKREKASVIVLKIQTKHPNPESFKTSLEPSPPLSPHSLCIRWKPYSNSSEFQANASVLLILFVSALICGLSLCAAIRCFLRPNLQTDDNEHKPDPEEDVSSTVPTPTLVYSSDLELAGAQAECAICLSEFEPGESIHVLEKCHHGFHIKCIHKWLSSRSSCPTCRTSIFSQNTLDSATSAVAPSTNEINA

SEQ ID NO: 2942 - protein, 81 aa, Brassica napus
MVRLRSGGDSSPGPDEPGSSGTHGGIRRFPLAAQPEIMRAAEKDDQYASFIHEACRDAFRHLFGTRIALAYQKEMKPGGQM

SEQ ID NO: 2943 - protein, 151 aa, Oryza sativa (japonica cultivar-group)
MRCDDDDESAADLAGSGGAAAAADRSVGWTVRLLPVVSSPNSTLSSLSGKRGAPSAAAAAVGGSDDEDSDDGSRKKLRLSKDQAAVLEDTFNKHNTLNPKQKAALARQLNLKPRQTEVDCELLKRCCETPTDMKLKRGPPLPLPPPPPPLL

SEQ ID NO: 2944 - protein, 345 aa, Oryza sativa
MDFSGDIDDLISLQLLHDQLLGVEADACLPVAVHHDGVAAFAEHQQGFHPAAFLPQQPMTMTPAGYVDMANDQYLGAHAAAGEAEAVYRAAAAEPVMIRFGGEVSPVSDPRRPPLTISLPPTSHAWAAAEAVHPAALLQAQAAAAAADPNDFRKYRGVRQRPWGKFAAEIRDPKKRGSRVWLGTYDTAIEAARAYDRAAFRMRGAKAILNFPNEVGSRGADFLAPPPPPPPPTTSTHGKRKRHETAAADPDVEVIGESSKSVKTETYTSPASSSLASTTTSTVTSSSTSPSPSSEAAACGGGGGSELFVPPMPSSWSWDQLEGFFGILSPLSPHPQMGFPEVAVN

SEQ ID NO: 2945 - protein, 200 aa, Fraxinus excelsior
GKWWEVFKEKQLKQLQKSHNSRQEYDNPVAGSAVAGGGSPEKAVQGKYDHILETFAEKYVQPKMFAFQSPNIIIPPNLPLPEPPPVLSIGSSEPVQLSGPILPPWMNNTTHPHTQTSSSLTSSSSSTHSPSVSLTLSPSEPAVLDPIHPEPGLPTRFLPIKQMNTLIQYCKELEEGRQIWLHHKKEATWRLTRIEQQLES

SEQ ID NO: 2946 - protein, 286 aa, Triticum aestivum
MPAPATCQGEDHDDLALGLRVTATQRADQDNQRISIETAEGEEDSDEACRELPVRASPFRQASSQTASANSRGFDVNAAVPVDGRASIVRSLSPPSMHMEVPVTQGVDEEASEDEDNGGGRVRKKLRLSKEQSAFLEGSFKEHSTLTLEQKSCLANRLSLRPRQVEVWFQNRRARTKLKQTEADCERLKRCCEALARENRKLQREVAELRASRAPYPLYNLNHHLSGFSTVLPAGSSCDATTRFTVSAVSSPGPSPVSTWFPGRAHFGPFTVHPVLPLCRQPSATL

SEQ ID NO: 2947 - protein, 429 aa, Zea mays
MRGSVRDMYGSATDDDRISHPQRRRSRAPRPLAASVHHPCTHPNETTQLNVSTQPVSSRHSTGFPPTAAAPPPVTVPRACPRRDHLTTPTYDATSHAPSHTRHRFKTLTPLTHHTRTVSPQRARARRPSNHRENKSQPNSPVSQRSLSLHYSTMSSMELLHAVVPEKQSEEEVAPAATTTSSSATATGGDEGAHVLQGWAKRKRSRRQRSEEENLALCLLMLSRGGHHRVQAPPTPVPSAAPAAAEFRCSVCGKSFSSYQALGGHKTSHRVKLPTPPPPPPAVTVPAAVPVPEAPAPTTVVVPPLPPVEVGREPATSSTAASSDGAASSRVHRCSICHKEFPTGQALGGHKRKHYDGGVGSAAASTDVPAAPAETSAEVGSSAARAFDLNLPAVPEFVFRCGKPGKMWEEDEEVQSPLAFKKPRLLMTA

SEQ ID NO: 2948 - protein, 226 aa, Glycine max
VFLNRMEATNRSSSSTSSSSDCCSSESNPNKPDRIKGPWSAEEDRILTGLVERYGPRNWSLISRYIKGRSGKSCRLRWCNQLSPAVEHRPFSAQEDDTIIAAHAQYGNRWATIARLLPGRTDNAVKNHWNSTLKRRAKGININVNHANNEVAASSSAPSRHFDFEDDPLTALTLAPPGIANGTVAEDAVPDHRASPEGFWDMMRDVIAREVREYVSSNFSDNSGFH

SEQ ID NO: 2949 - protein, 504 aa, Medicago truncatula
MDTLFRLVNFQQQQQQYQPDPSLNSTTTLTTSSSSRSSRQTTYHYYNQQEEDEECFNNFYYMDHNNNNDEDLSSSSSKQHYYTYPYASTTTITTPNTTYNTINTPTTTDNYSFSPSHDYFNFEFSGHSWSQNILLETARAFSDNNTNRIQQLMWMLNELSTPYGDTDQKLSSYFLQALFSRMNDAGDRTYKTLTTASEKTCSFDSTRKMLLKFQEVSPWTTFGHVAANGAILEALEGNPKLHIIDISNTYCTQWPTLLEALATRSDDTPHLRLTTVVTAISGGSVQKVMKEIGSRMEKFARLMGVPFKFKIIFSDLRELNLCDLDIKEDEALAINCVNSLHSISGAGNHRDLFISLLRGLEPRVLTIVEEEADLEVCFGSDFVEGFKECLRWFRVYFEALDESFSRTSSERLMLEREAGRGIVDLVACDPYESVERRETAARWRRRLHGGGFNTVSFSDEVCDDVRALLRRYKEGWSMTSSDGDTGIFLSWKDKPVVWASVWRP

SEQ ID NO: 2950 - protein, 267 aa, Arabidopsis thaliana
MSSSTMYRGVNMFSPANTNWIFQEVREATWTAEENKRFEKALAYLDDKDNLESWSKIADLIPGKTVADVIKRYKELEDDVSDIEAGLIPIPGYGGDASSAANSDYFFGLENSSYGYDYVVGGKRSSPAMTDCFRSPMPEKERKKGVPWTEDEHLRFLMGLKKYGKGDWRNIAKSFVTTRTPTQVASHAQKYFLRQLTDGKDKRRSSIHDITTVNIPDADASATATTADVALSPTPANSFDVFLQPNPHYSFASASASSYYNAFPQWS

SEQ ID NO: 2951 - protein, 607 aa, Arabidopsis thaliana
MAIQTQLPCDGDGVCMRCQVNPPSEETLTCGTCVTPWHVSCLLPESLASSTGEWECPDCSGVVVPSAAPGTGISGPESSGSVLVAAIRAIQADVTLTEAEKAKKRQRLMSGGGDDGVDDEEKKKLEIFCSICIQLPERPVTTPCGHNFCLKCFEKWAVGQGKLTCMICRSKIPRHVAKNPRINLALVSAIRLANVTKCSGEATAAKVHHIIRNQDRPDKAFTTERAVKTGKANAASAANDVTRNQGVLVGESWEDRQECRQWGVHFPHVAGIAGQAAVGAQSVALSGGYDDDEDHGEWFLYTGSGGRDLSGNKRVNKIQSSDQAFKNMNEALRLSCKMGYPVRVVRSWKEKRSAYAPAEGVRYDGVYRIEKCWSNVGVQGLHKMCRYLFVRCDNEPAPWTSDEHGDRPRPLPDVPELENATDLFVRKESPSWGFDEAEGRWKWMKSPPVSRMALDTEERKKNKRAKKGNNAMKARLLKEFSCQICRKVLSLPVTTPCAHNFCKACLEAKFAGITQLRDRSNGVRKLRAKKNIMTCPCCTTDLSEFLQNPQVNREMMEIIENFKKSEEEAEVAESSNISEEEGEEESEPPTKKIKMDKNSVGGTSLSA

SEQ ID NO: 2952 - protein, 244 aa, Zea mays
  misc_feature (32)..(32): Xaa can be any naturally occurring amino acid
  misc_feature (68)..(68): Xaa can be any naturally occurring amino acid
  misc_feature (92)..(92): Xaa can be any naturally occurring amino acid
  misc_feature (139)..(139): Xaa can be any naturally occurring amino acid
  misc_feature (158)..(158): Xaa can be any naturally occurring amino acid
  misc_feature (167)..(167): Xaa can be any naturally occurring amino acid
  misc_feature (227)..(227): Xaa can be any naturally occurring amino acid
PSPSPSHYTSGCPFGEGCHFIHYFLSGYQAVXKNDQPPGSMMMDGSPTPVVKTRLCNKYNTAKGCKWXDKCYFAHGERELGKSMMDNYMPPXIEPRPTGYFAPPPMAYPGLATLTRFGASATTKIGVDTSFAGSIIGRXGGANTKQISFVIGAKLAIXDHESYTSLXNIELEGTFDQIRNASAMVSELIVSVSGIAPPQVKNPTDRTHHGGGIGSNFKTKMCENLSXKCHFAHSESELRMPTAA

SEQ ID NO: 2953 - protein, 218 aa, Ipomoea batatas
MGRGKVEIRRIEKSTNRRVTFWKRRNGLLKKAMEMGILCDAEVGLMIFSSTGKLHEFATTSIRSVIERYNKTQGDSLQSPLDPTLELKFWQIEVAILRQQLHNMQEDHRKVMGEVYGLSVKDLQNLENQLEMSLSGIRMKKEQILIEQIQELTHKQGSFVHQENFELFNKFQAYGTSDPNAVNGDTISPYDFTISEESQGHIHFQLPQNFSDLARALY

SEQ ID NO: 2954 - protein, 147 aa, Brassica napus
LSPYFRSPRFVPLAAETLAAAAAAAADHREQAQMGGKCPHRKVKKRRLNCKQVRRGKFLVKADDAVYDELVKLADQGKDSEGKALPVDEDLPGMGQFYCLHCDRYFADETVKEDHYRSKRHKKRVKQLSGPAPHTQIDADLAGGMGM

SEQ ID NO: 2955 - protein, 186 aa, Ostreococcus tauri
MAKKSSKKTSSTAVLMPTVDARARSTNRKKGRKGYRMWTDDEKDALAVGVAKYGLGNWMAMKKDPLLGPKLASRTNIDLKDKWRQSTTPTKSGLTRTQPLSPRAFAVVEDIQANGGRQVSGVEFDRHLSPVRVVEKSPFGSTANPNEEMVASPRPMLSTRLDSTRQNPRTTKCPNTRTDPATERRP

SEQ ID NO: 2956 - protein, 522 aa, Malus x domestica
MSIITGSAATGSFSSGNTGGEEVQQQQQELLNHHANFHGSNSLLPTTPNINSNGISTTQVQKQPPPAKKKRNLPGTPDPTAEVIALSPKTLMATNRFVCEICKKGFQRDQNLQLHRRGHNLPWKLKQRTSTEIIKRVYICPESSCVHHDPSRALGDLTGIKKHFFRKHGEKTWKCDKCSKKYAVQSDWKAHLKTCGTREYKCDCGTIFSRRDSFITHRAFCDAIAEENNRNQGVVPMSNNIMGAPNQGQLSNSELIIPASPPMNNKITDNPSSARSDTTTSDQFHHNFDAKNAPLTLEPQQPFPMPTKPVNMLPRTLSNNTSSSTSPSSLLFGLNHGGHDQSLIPNSSGHLSATQLLQKAAQMGATMSGGPNPNPSGTTITSMAPSTYGTATGGYNMNPFMQQRDPNNILQLETSPQFFGANYAQMGMFSGMLFDHAQNNGLLKNMEHENNGTSNKIGFRGASNVGNGDTLTVDFLGLGGSGNNNRPENFHDLQKQQHGQQDQLGFGGIDDHDDHLRMQRFG

SEQ ID NO: 2957 - protein, 313 aa, Ceratopteris richardii
MAMPCSDIDLLDSDNDNVDDQHISLELRQVHEDTDDGSHDEPRELSLLNHESNLCKIVNSKGKGAEAGNSLLPSTGTSRGKIQIRRIENTTSRQVTFSKRRNGLLKKAHELSVLCDAEIALIIFSSTGKLFEYSSSRGIKKILERYKRCSGILQDVGGTVIRDVEYWKQEAERLKERLTYMEEIQRNMLGESLGSLQIKDLQNLEAKLDSGLYKIRGAKTQLMARQVQELQKKEQILLQQNEALRAKLAELSCLQAPVSGLTTATTSQDVQESSSGRGSRQRETSLSAAETTLQLASHNEQTFLLRAVPHMRL

SEQ ID NO: 2958 - protein, 315 aa, Glycine max
MKRLGSSDTLGALMTICPPTDEHSPRNNHVYGKEFQSMLEGLDEEGCVEEAGHHSEKKRRLNVDQVKALEKNFEVENKLEPDRKVKLAQELGLQPRQVAVWFQNRRARWKTKQLERDYGVLKANYGSLKLNFDTLQQDNEALLKQIKELKSRLVQEENNNNTESDVSVKEEMIATLQDSNPLCESAIPGSDSKELSYECFNKSDEVGGGSVFPVDFKDGSSDSDSSAILNEENNNHSPNNNAAISSCGVLQSHGLLSSPSSSSMNNCFQFQKQYQTTTQYVKMEEHNFLSADEACNFFSDEQAPTLQWYCSEEWS

SEQ ID NO: 2959 - protein, 157 aa, Solanum demissum
IMERLLERYERYSYAERQLNATDIETPGSWTLEHAKLKARLEVLQRNQKHYAGEELDTLSMKELQNLEHQLDSALKHIRSRKNQLMHESISAAAKGSKALQEQNNNLSKQVKEREKEMAQQTPWEQQSHDHLNSSSFVLPHPFNNLHMGSIPNCRRQ

SEQ ID NO: 2960 - protein, 694 aa, Glycine max
EGACMVCKGLPGQEERLLCVTCDTPWHVPCLFAPPPTLSATARWLCPDCSILDSDVPPVPAPARNQLVAAMLAVENDASLTQHDKARKRQELLTGKAPADDDDDDEQENKSSLSDILSRSLNCSICIQLPERPVTSPCGHSFCLKCFEKWVRQGKRNCAKCRQIIPAKMTSQPRINSALVFAIRMARQASNSSGSGRGGVRSVNHFLHNQDRPDEPFTTERAQRSGRANAASGKIFVTVPTDHFGPITAENDPLRNQGLLVGESWRDRLECRQWGAHFVPVGGIAGQSDRGAQSVVLSGGYVDDEDHGEWFLYTGSGGKDLSGNKRTNKSHSFDQKFEKYNRALQVSCLQGYPVRVVRSHKEKRSSYAPETGVRYDGIYRIEKCWQIAGLQGFKVCRYLFVRCDNEPAPWTSDDHGDRPRPLPVIRELKKATVIHERTESPSWDFDEEDSRWKWKKPPPPSRQKVQNVEPVEVARAKSNKEVKKFQLKSIKEQLQRGFSCMICKEVMVSPVTTPCAHNFCKSCLEGEFAGQAFVKERSKGGRTLRSQKNVMKCPSCSIDISDYLQNIQVDIDLKSAIESLKAKVEEIGESVESSEDADGLQDDGAGKDEDTDSRNKNSVQELNGLPEGSDVGELEDTTNKEPDPAMKCNGKRKKGDYGNQSPDDKMEKRGKNYKTTEEELHEENDSSSSPLHPQ

SEQ ID NO: 2961 - protein, 558 aa, Oryza sativa (japonica cultivar-group)
MSAAAEEAAAAAAAEEVEGVEAGKKGVADAKGKGKEKVVVAEEDSAVAAGSGGSGGGRRTLVAYPARVAGYKDVVADAAVFRRALEGLHAQMGTKLKVPIIGGKDLDLHQLFKEVTSRGGIDKKYYMSLLYHFERLYLFEAQGWYQETADSRSISCIEMKAEGQASRKRKRGSNSCSSDPPINLECTLCSTPLIKVPRYNILAPTIHFGSEKGQAGMKSTWSAQKVLALIGQKLTIKIREIKGKNSQLEHSNPGCRGNHEAIKPLDHLSACYLLYPTSLLSFLYGQRQELVPLTLSDLAASLDNDVQVIIDGKFEHGYIVTVIMGSKSTKAVLYNCTEEPAVPTAVPHVAIDSAEGIRPRRRRRRKKLSTTDPNHPKPNRSGYNFFFQDQHRKLKPEYPGQDRLISKMIGERWNNLGPEDKAVYQEKGVEDKARYQRQLALYREQRTGQPISNAVPIQQRLPQKEVTIDEVDSKVSEGDILLSNQGYSSSTSSSDETADSGEKNVEDDEEFNTETSPEPSMETTDSHGQPDPSADGERFELRRRENPKIDEKRDMPPN

SEQ ID NO: 2962 - protein, 373 aa, Glycine max
MASSDPISSRHYTYNRKQKSLGLLCTNFLSLYNRDTVHLIGLDDAATRLGVERRRIYDIVNVLESIGVLSRKAKNQYTWRGFAAIPLTLQDLKEEGLKENSNSLRGPGNHDKVSDDEDDEETQSNPAATGSQSDKLNPNSTLPKPLKNENRREKSLALLTQNFVKLFVCSNVELISLDEAAKLLLGDAHNTSVMRTKVRRLYDIANVLSSMNLIEKTHTMDTRKPAFRWLGSEGKTWDETLHKSNLNDSRKRAFGSDITNISFERNKVELFTSGDLNPNPKKPRMENGSGLGEADENNLKQGIKQASKSYEFGPFAPACVPKVGASQNNNMKQVHDWGSLATAHSPQYQNEASPSLLQQGHCTVKASSCASFV

SEQ ID NO: 2963 - protein, 281 aa, Picea mariana
AAGSGYWKATGADKPITAKGGKKRVGVKKALVFYVGKAPNGSKTNWLMHEYRVTNVSRPVKKKNSLILDDWVLCRIYNRRISAEKLALQQKESFNDVPMETIDEKEMENQLTSTSIEHSGIEQSNPSFDHLSKLGSSPTCYNSAPLCVSPMNSNICLQNLDFFQNSTTPFSDSTLKAPVQNTTFNPISSSINHQWTNCNSTDLMSGLHNDSSCSKPSSFSEPISEKEEVQSSFRLENFSQEQQQSLFNFGLEGLQNTFTHLDQITLPGAYQDWFYPNEPFH

SEQ ID NO: 2964 - protein, 273 aa, Arabidopsis thaliana
PLSSSSSVATVTSDSRRFSGHRVSPETERSSVLDSLPIFKFSSVTRRSSSMNSGDCAVCLSKFEPEDQLRLLPLCCHAFHADCIDIWLVSNQTCPLCRSPLFASESDLMKSLAVVGSNNGGGENSFRLEIGSISRRRQTPIPESVEQHRTYSIGSFDYIVDDVDSEISESNFNRGKQEDATTTTATATAVTTNPTSFEASLAADIGNDGSRSWLKDYVDRLSRGISSRAMSFRSSGRFFTGSSRRSEELTVMDLEANHAGEEISELFRWLSGV

SEQ ID NO: 2965 - protein, 219 aa, Pyrus communis
GKLRSNFLGTKFTIFDGQPSHSGARIAKSRSTRLVNLKQETPRVPAGNYPVAQIQYELNMLGSRGPRRMQCTMDSIPSSSIEPGGVAPTQAEFSHNNAELFPSLSFNRSKSNRMESFLSGPLARQKDGVLVLRNKSPRWHEQLQCWCLNFHGRVTVASVRLSVGGFSGNGPPGPEHEKIILQFGKVGKDQFTMDYRYPISAFQAFSICLSSFDTKIACE

SEQ ID NO: 2966 - protein, 450 aa, Oryza sativa (indica cultivar-group)
MGGNQEYMIRFDGHIDDASPSSATAEPPPPLPPPRPFAGRAISAEREHSVIVATLLHVISGYRTPPPEVFPAARAEVCGVCGMDQCLGCEFFAGESGVVSFDGAEKVAAAAAAAAAGAAAGQRRRRKKKNKYRGVRQRPWGKWAAEIRDPRRAVRKWLGTFDTAEEAARAYDRAAVEFRGPRAKLNFPFPEQLSAHDDSNGDASAAAKSDTLSPSPRSADADEQVEHTRWPQGGGGGGGGGGGETGDQLWEGLQDLMQLDEGGLSWSPTNFDSKSNFESNLKTLLINHCYLIKSGNRPANSLTHCTRSGGILVFHPLAASFSRSQPILVPLQHENDRSGSLPPPHQQQPSGFTASLVTAAGRGDATIGVGGGGVTRPKFPPNLAAQPGVAAASARGNGQFGVCPRGRQLKCLSAAVARESRRGRVVERGASPGSGCGCAGAEISDLIGSF

SEQ ID NO: 2967 - protein, 593 aa, Oryza sativa (japonica cultivar-group)
MPAVKVEEEEEERNPVASSPSVSEGSAHAAALASPTAADSIFGRRRKSGPVRRAKGGWTPEEDEKLRKAVDIYNGKNWKKIAESFSDRTEVQCLHRWQKVLDPELIKGPWTQEEDDVIINMVKKHGPKKWSVIARSLNGRIGKQCRERWHNHLDPQIRKEAWTVEEERVLARAHCMYGNKWAEIAKLLPGRTDNSIKNHWNSSLRKKIDDYNTRDILPVHPPVVGDGLKQLPKRPPADNHFDLNKEPIICSRDRLGVVHSDPTSHQRASNLKDFKGCADYLSLGQPVTSCEASAADDSAFDLATQGMRMDSVHDKGTGNNFVCGKVQGINFLGDKGLKINQISDKMGCSRQAKREGEAAINGGGSSLQSEAHSVGSLCYQIPKMEDIAPAQSPVFTANYVPEHSRNVMHSPNGYTTPPTHGKGSDQLSVESILRSAAEKFHGTPSILRRRKRDKPTPAEDNDLKIGRLSSDDFHTPIGKCTTDSPQSFKTAALLSLGPMDEQGSLDVSPPYRLRSKRLAVLKTVQNHLDFSSDEMSICDTTMKSACGNSDCANASSGVSSIQGKKLDEHMIGLETLTMNFAHTTKLDATQPNL

SEQ ID NO: 2968 - protein, 96 aa, Glycine max
SARVNDQFVLDAYRKGDKLKFANHSPDPNCYAKVIMVAGDHRVGIFAKERICAGEELFYDYRYEPDRAPAWARKPEASGSKKEDGAPSSGRAKKLA

SEQ ID NO: 2969 - protein, 225 aa, Brassica napus
  misc_feature (201)..(201): Xaa can be any naturally occurring amino acid
MDQQEHGQSRAMNYSTNPYQTGSVGPTAPSGQMAFHQHHQQQQLTQQLQVFWENQFKEIEKTTDFKNQSLPLARIKKIMKADEDVRMISAEAPVVFARACEMFILELTLRSWNHTEENKRRTLQKNDIAAAVTRTDIFDFLVDIVPREDLRDEVLGSIPRGTVPEASATGYPYGYLPSGTAPVGNAGMVMGNPDSAYPPNXPYMGQPMWQHQETGNLNSKTSLEF

SEQ ID NO: 2970 - protein, 204 aa, Populus tremula x Populus tremuloides
MEFERDLNLDATELRLGLPGTATRQSEKQTPNSNLAKSNKRSLPDMNEDPAGSSRENSSTVSSNEEKSHDQETAPPPIKAQVVGWPPIRSYRKNCLQAKKQEAEAAGLYVKVSMDGAPYLRKIDLKVYKGYPELLKALEEMFKSKVGEYSEREGYNGSEHVPTYEDKDGDWMLVGDVPWDMFINSCKRLRIMKESEARGLGCAV

SEQ ID NO: 2971 - protein, 240 aa, Medicago truncatula
MGRGRVQLKRIENKINRQVTFSKRRAGLLKKAHEISVLCDAEVALIVFSHKGKLFEYATDSCMEKILERYERYSYAERQLVANDSESQGNWTIEYTRLKAKIDLLQRNYRHYMGEDLGSMSLKELQSLEQQLDTALKLIATRRNQVMYESISELQKKEKVIQEQNNMLAKKIKEKEKIAAQQQAQWEHPNHHGVNPNYLLQQQLPTLNMGGNYREEAPEMGRNELDLTLEPLYTCHLGCF

SEQ ID NO: 2972 - protein, 218 aa, Triticum aestivum
  misc_feature (179)..(179): Xaa can be any naturally occurring amino acid
MAPKNALPVAVAAAADAGMEPRFRGVRKRPWGRYAAEIRDPARKARVWLGTFDTAEAAARAYDAAALHYRGPKAKTNFPVGTVAAFAHVPLPPPKALAVSPSSSTVESSSRDTPAAAPAAPAAAAPAPPPALDLSLAMPAMVAAQPFLFLDPRVAVTVAVAAPAPAPCRSAAISGMNKXASREEEQSDTGSSSSGGGTPPRPGAGGSTLNLPPPGEMA

SEQ ID NO: 2973 - protein, 332 aa, Glycine max
MAVDLMTTGYTRNDNISSFTTKAEENAVQEAASGLESVEKLIRLLSQTQAQAQAHHQFNNNNSSSNEIAIAMDCKAVADVAVSKFQKVISLLGRTRTGHARFRRAPLPNQHQHTQPPSEPPVLHATPLHQIPPPSLHQIPKTEKHLNDSSSKTLHFSYPSAVTSFVSSLTGDAADNKQPSPAATTTTSHFQITSLSHVSSAGKPPLSSSSFKRKCSSENLGSGKCGSSSSRCHCSKKRKMRLKRVVRVPAISLKMADIPPDDYSWRKYGQKPIKGSPHPRGYYKCSSVRGCPARKHVERALDDPAMLVVTYEGEHNHTVSAADATNLILESS

SEQ ID NO: 2974 - protein, 357 aa, Heteropogon contortus
PSVKHMFPFCDSSSPMDLPLYQQLQLSPPSPKPDQSSGFYCYPCSPPFAADASLHLTYQIGSAAAATRPQAVIDSPDLPVQPLMEQAPAPATELGTCASGAQGAGVSISLDKAAAAARKDRHSKICTAGGMRDRRMRLSLDVARKFFALQDMLGFDKASKTVQWLLHTSKAAIQEIMADDVDASSECVEDGSSGLSVDGKQHNPAEQLGGGDQKPKGNGRSEGKKPAKSRKAATTPKPPRKSGNNAHPVPDKETRAMARERARERTKEKHRMRWVKLASAIDVEAAAASVASDRPSSNHLNHHHSSSSSSMSTMNMPRAAAAELEDRERCPSAVNSRGRMQEITGASDVVLGFGSGG

SEQ ID NO: 2975 - protein, 317 aa, Zea mays subsp. mexicana
LGVPSVKHMFPFCDSSSPMDLPLYQQLQLSPSSPKTDQSSSFYCYPCSPPFAAADTSFPLSYQIGSAAAADATPPQAVINSPDLPVQALMDHAPAPATELGACASGAEGSGASLDRAAAAARKDRHSKICTAGGMRDRRMRLSLDVARKFFALQDMLGFDKASKTVQWLLNTSKSAIQEIMADDASSECVEDGSSSLSVDGKHNPAEQLGGGGDQKPKGNCRGEGKKPAKASKAAATPKPPRKSANNAHQVPDKETRAKARERARERTKEKHRMRWVKLASAIDVEAAAASVPSDRPSSNNLSHHSSLSMNMPCAAA

SEQ ID NO: 2976 - protein, 218 aa, Glycine max
MDWHHGTKPLVPRPETLSFFYNYNYNSPYPGVEVKQAALMETGEGSVPALMDSRNKEKKKRLTNNQIELLERSFQEEIKLDPERKMKLSRELGLQPRQIAVWFQNRRTRWKTKQLEHLYDVLKHQYDVVSNEKQKLQEEVMKLKAMLSKEQGFGKQTFGCYTEISGEETVESTSEGLTLRGKSNIEHVADQGYCSFTVEDYNTTVLLPPHCHWPAVPY

SEQ ID NO: 2977 - protein, 354 aa, Phacelurus digitatus
PSVKHMFPFCDSSSPMDLPLYQQLQLSPPSPKPDQSSSFYCYPCSPPFAAAAAYASFHLSYQIGSAAASTPPQAVISSPELPLQALMEQAPAPAPATELGACASGAQSASVSVSLDRAAAAARKDRHSKICTAGGVRDRRMRLSLDVARKFFALQDMLGFDKASKTVQWLLNTSKTAIQEIMADDASSECVEDGSSSLSVDGKHNPAEQLGGGDQKPKGNGRSEGKKPAKARKAATTPKPPRKSGNNAHPVPDKETRAKARERARERTKEKHRMRWVKLASAIDVEAAAASVASDRRPSSNHLNYHSLSSMNMPRAAAAELEERERCSSALNNRGRMQEITGASDVVLGFGNGG

SEQ ID NO: 2978 - protein, 241 aa, Populus trichocarpa
MGRGRVQLKRIENKINRQVTFSKRRTGLLKKAHEISVLCDAEVALIVFSHKGKLFEYSTNACMEKILERHERYSYAERQLVATDLDSQGNWTLEYNRLKAKVELLQRNHRHYLGEDLDSVSLKELQNLEQQIDTALKLIRERKNHLMYQSISELQIKEKAIKEQNNMLVKQIKEKEKALAQPALWDQQDHGPNASSFLLPQPPLPCLNISYQEEDPEARRNYELDLTLEPIYSCHLGCFGT

SEQ ID NO: 2979 - protein, 162 aa, Populus trichocarpa
MGRGRVQLKRIENKINRQVTFSKRRTGLLKKAHEISVLCDAEVALIFFSHKGKLFEYSTNACMEKILERHERYSYAERQLVATDLDSQGNWTLEYNRLKAKVELLQRNHRHYLGEDLDSVSLKELQNLEQQIDTALKLIRERKNHLMYQSISELQIKLYPIG

SEQ ID NO: 2980 - protein, 312 aa, Oryza sativa (japonica cultivar-group)
MELLLPTAAASAPPPPPAFPADPHLVDRAARFSAFASPSPPSPPPPPPPPPSSSSKRKPDPASKGKAAAKKGKTAASGEDGGDGGEDEKPAYVHVRARRGQATDSHSLAERARREKINARMELLKELVPGCTVSVRSKGTLGVQQRVMPSVGVQQQQHVVAPFFISKTEVSGTALVLDEIINHVQSLQRQVEYLSMRLAAVNPRVDFGGLDNFLTTECGRITGLNYKNGMDLEQVTWPDMGVHGARNLMQLQQQFWHGDLAHPLQPPSQWEKRTDTNPPVFSNSSSSLFGYDLASSALIGPQLLSLSLFQSV

SEQ ID NO: 2981 - protein, 244 aa, Impatiens hawkeri
  misc_feature (198)..(198): Xaa can be any naturally occurring amino acid
MGRGRVELKRIENKINRQVTFAKRRNGLLKKAYELSVLCDAEVALIIFSNRGKLYEFCSSPSMLKTLERYQKCNYGAPEANISSRGALELSGQQEYLKLKQRYETLQRTQRNLLGEDLGPLDGKELDTIERQLDTSLKHIRSTRTQHMVDQLEDLQRKEQILNEANRALKQRLLESSFNWMQNGQHVDYSGPAVQPNXDELFHPLECEPTLQMAMGYQTHHDPTSVEAAGAGPSMNNYFPGWLS

SEQ ID NO: 2982 - protein, 188 aa, Impatiens hawkeri
  misc_feature (48)..(48): Xaa can be any naturally occurring amino acid
MARGKIQIKRIDNDTNRQVTYSKRRNGLFKKAGELTVLCDAKVSIIMXSSTGKLHEYISSSISTKQLFDHYQNTLAVDLWSSKYQRMQEHLKKLKEANRLLRLEISQRMGENLSQLCYEDVMKLEQDVDSSLQQIRDRKFKVLGNQIEIHKKKLRNVEQTHRNLLQQFGFREEEETQYALAENEGGWL

SEQ ID NO: 2983 - protein, 191 aa, Nicotiana tabacum
MTFAGTTQKCSACEKTVYLVDRLAADNRIYHKACFRCYHCKSTLKLSNFNSFEGVIYCRPHFDQLFKRTGSLDKSFEGTPKVTKPEKPVDNENGSGTKVSSLFAGTREKCVGCTKTVYPIEKVSVNGTAYHKACFKCSHGGCTISPSNYIAHEGRLYCKHHHIQLFKEKGNYSQLESDHETDPALSTQSLT

SEQ ID NO: 2984 - protein, 188 aa, Helianthus annuus
MAFAGTTQKCMACDKTVYLVDKLTADNRVFHKACFRCHHCNGTLKLSNYNSFEGVLYCRPHFDQLFKKTGSLDKSFEGTPKIVKQPKTIDGEKPMANKVSSMFVGTKDKCLGCKNTVYPTEKVSVNGTAYHKSCFKCSHGGCTISPSNYIAHEGHLYCRHHHTQLIKEKGNLSQLEGERSARVGETAP

SEQ ID NO: 2985 - protein, 501 aa, Kluyveromyces lactis NRRL Y-1140
MTSLDDYNFELSEDDEYYQFVEDSDYESDYSSGKVLKVDESFQGSDDLRLRYKSLSTNELYDDVMERVEFVRTITQLSTDSMIILLRLYGWNEEKLLEDYTENPSEILEKGGLIVPEHCKKRDLTDKPHYTCLICCDSYSKVPVFRMECGHEACINCYRTYLTSTLKKPKAPTCMSCHLSITSSDIDRIFGNKEFSKKHICLSFETFINKHSKNYKWCPYTGCGNIIYSNNESTLNEMLKRHKIPEVECSNKHAFCFYCSTEVHTPSDCKIAQYWIQKVRDESTNLNWILNNTKPCPFCGTSIEKNGGCNHMTCQSCHSEFCWICDGKWAIHTDNYVCKFQNEKKDNTINKSITKRFTDGYKMFIVHENSSDLDLKLAGTIESKIFTLQKELGISWIEGQFLSESIKILLHGRSVLKWSYAIGVFCDPSHNLTHILEQNQTMLSNAVESLSLKIQIKDPKVLIKSKAEFHDASSLVNGRVVALEKCCQELLIKGICKLEAI

SEQ ID NO: 2986 - protein, 181 aa, Nicotiana tabacum
MTFAGTTQKCSACEKTVYLVDRLAADNRIYHKACFRCYHCKSTLKLSNFNSFEGVIYCRPHFDQLFKRTGSLDKSFDGTPKVTKPEKSVENENGSGSKVSSLFAGTREKCVGCTKTVYPIEKVSVNGTAYHKGCFKCSHGGCTISPSNYIAHEGRLYCKHHHIQLFKEKGNYSQLESDHET

SEQ ID NO: 2987 - protein, 113 aa, Arabidopsis lyrata subsp. petraea
STGKRSEREEDTDPQGSRGISDDEDGDNSRKKLRLSKDQSVILEETFKDHSTLNPKQKQALAKQLGLRARQVEVWFQNRRARTKLKQTEVDCEFLRRCCENLTEENRRLQKEV

SEQ ID NO: 2988 - protein, 621 aa, Ustilago maydis 521
MAGKRNRWTRNEDEILKKAVLSSAKPRPSWAMIAKHIPGRSSKDCRKRWEHGLNQNLSRGPWSGSEDARLKAAVAEHGLHWALVATKVGKRTSDQCAKRWCDVLDPSLKKSEWTADEDSALLGLYQQLGTAWAKLATHIPGRSALSCRNRACKILVQRGEPRPGSVEAEELRLTMLAQQQPNSNPSSPLLSCSSPMSASGLSAAAITSPPQLNSQPQFIQMSDKDLNSVLPWHRSPSESVGHIYSEPGGWLPGSPGDAVLDSLLVSTPGACDDFSLGIGMAQGGSLLQTLFEPAATTSASELQFDLAPLFESASVSRDQATPVPGYIEPVDGRSDLDMIDLTSYAAPSMSSWTANESLTSSSSSTSPCTRWSTPAEDSGRLTSAKEWLSSGEAKPSPDNETSYTSRLNHMHPPLQASRATQVSARRMSLPALGQIMTMAGDPARVLQMLATEFDADRVCCRTRSTSTNADVSSKTCSGSDDACLTSRNVDSSSSSSATTWQRSYTASEASTLPVWMHTLLDTASHSTNTLETDQVISAHACQTMQHPLQLSSKPDIAMLRLPNFSGDQVWLDNSHNQHGSSRHVVELSGLVRNMADLMANMATLARAISSGGTASATNTVV

SEQ ID NO: 2989 - protein, 559 aa, Oryza sativa (japonica cultivar-group)
MSSAYTVHRSISLLSVIQLNNSSQWRAERIKQQIKVHFCANRLAHRKLFVASLSFEKDMTGNKSFMEPRFFGPKVLRQAKHPMRHAVHHFFTFLFDYKYSVIRVLQNENDVGHVFRALAKFKSLLLDVVRKKRAPTRGGGGKKYAIGYRSRPEKSKKRIASFMKLLRFNWAAAAAVTPARAKDLELHYHPYYYDYDDSTWNVVVPADGAAEELRGGGGDDGEDCGYLCWLEEETSAGALPAAGEGEDGGNGNGDGDGNGAVNEIDRLAERFIARCHAKFLLEKQESYRRYQEMMARSITIGCPFGEGCHFSHFVPGGYQAVAKTLNLGNPAVPAPARAPMDHAAGGNSHPASSGKTRMCTKYNTAEGCKFGDKCHFAHGERELGKPAYMSHESAMAPPMGGRYGGRPEPPPPAAMGPPAGNFGASATAKISVDASLAGGIIGKGGVNTKQICRVTGVKLSIRDHESDSNLKNIELEGNFDQIKQASNMVGELIATISPSTPAKKPAGSAAGAAPAGRGGPGGRSNYKTKLCENFVKGTCTFGDRCHFAHGENEQRKGAA

SEQ ID NO: 2990 - protein, 353 aa, Coprinopsis cinerea okayama7#130
MVQGSCKISAVALIKMVIHARSGVPHEIMGLMQGKVVGTSIVIMDSFALPVQGTETRVNAAAEANEYMVEYIQGSEKAGRLENAIGWYHSHPGYGCWLSGIDVNTQMNNQKFQDPFIAVVIDPNRTISAGKVDIGAFRTYPENYTPPNASSSEYQSIPLSKIEDFGVHANQYYQVDVEIFKSSLDNELLALLWNKYWVNTLSQSPLISNRAYAVSQLSDLHQKLSKATSSVPSTRPIIPSLKSKDGEGKQKEKEEKKKDENQLAKSVMDRDGELGGGLRPPGPPSLAAFPDPRICLIATPRFPGTKIAVEAQHGLIAQVIKDVIFSMRPKNDAAQSSQAASAQVADVTDMAIG

SEQ ID NO: 2991 - protein, 314 aa, Zea mays
  misc_feature (151)..(151): Xaa can be any naturally occurring amino acid
MGLPMRRERDAEAELNLPPGFRFHPTDDELVEHYLCRKAAGQRLPVPIIAEVDLYRFDPWDLPERALFGAREWYFFTPRDRKYPNGSRPNRAAGNGYWKATGADKPVAPRGRTLGIKKALVFYAGKAPRGVKTDWIMHEYRLADAGRAAAXKKGSLRLDDWVLCRLYNKKNEWEKMQLGKTAVAGVGATKEEAMDMATSHTHSHSQSHSHSHSWGETRTPESEIVDNDPFPELDSFPAFQDPAMMMTVPKEEQVDGCSAKSGNLFVDLSYDDIQGMYSGLDMLPPPGEDFYSSLFASPRVKGNQPAGAAGLGQF

SEQ ID NO: 2992 - protein, 252 aa, Triticum aestivum
MGRGRIEIKRIENTTSRQVTFCKRRNGLLKKAYELSVLCDAEVALIVFSSRGRLYEYSNNSVKATIDRYKKAHACGSTSGVPLIEVNAQQYYQQEAAKLRHQIQMLQSTNKHLVGDSVGNLSLKELKQLESRLEKGIAKIRARKNELLSSEINYMVKREIELQSDSIDLRTKIAEEEQRLQQVTIARPSVAPELNPFTALDMKCFFPANLFEAAVHAHAQAQAQAQAQASLQLNLGYQQLAPPGAGDVAHQF

SEQ ID NO: 2993 - protein, 428 aa, Oryza sativa (japonica cultivar-group)
MGRHSCCYKQKLRKGLWSPEEDEKLMNHITKHGHGCWSTVPKLAGLQRCGKSCRLRWINYLRPDLKRGAFSQEEEDLIVELHAVLGNRWSQIATRLPGRTDNEIKNLWNSCIKKKLRQKGIDPNTHKPLAEVDRSKATPTISNDRTSESSDVDPSSGVALHNLSHLLSETAQSSELLPVKVTKPRTQAPGLARLKVPPKELFLDQLTSGHENLPSCRSSGPIPNFPFQQLLCYNNDFNSMDVGNRNSLWYNQNESSSSTISTVMPPVSPSTLSTSTGLNPSPDNANSRGTGIHNSQFYWDTNNPSSSSSTGSSGNNGLGFELQSTSSLLETNIFPWTDLAPEKDSQAQLEEELKWPDLLHGTFSEMPAPMQNLSQSLYEDVVEAESQFNMEGLCAAWSQNLLPQQHLPVVSDMYDKDLQRMSLSFENI

SEQ ID NO: 2994 - protein, 249 aa, Beta vulgaris
MEFPTQTMEGSPSSQRKMGRGKIEIKRIENTTNRQVTFCKRRNGLLKKAYELSVLCDAEVALIVFSSRGRLYEYANHSCSVKGTIDRYKKACSDQSGAGSVAEANAQYYQQEAAKLRNQIRTATENNRLLSRHMMGEGLSSLSMKELKNLETKLERGISRIRSKKNELLFAEIEFMQKREIELHNNNQFLRARISENERAQQSMSLMPGGSDYDLVPSQSFDSRNYFQVNALQPSSQYARQDQTPLQLV

SEQ ID NO: 2995 - protein, 198 aa, Brassica napus
MLSTVSETTSQERMKLSPPPLTNNEQPAADTAVKSCGGGGRETFSATRHPVYHGVRKRRWGKWVSEIREPRKKSRIWLGSFPIPEMAAKAYDVAALCLKGRKAQLNFPDEIDDLPRPSTCTARDIQVAAAKAANAVKIIKTGDDVANIGDGDDFWEGIELPELMMTRCGWSPEPFVAGDDATWLVDEDSYQYQFMACL

SEQ ID NO: 2996 - protein, 240 aa, Glycine max
MALEALNSPTTTAPSFPFDDPTIPWAKRKRSKRSRDHPSEEEYLALCLIMLARGGTTTVNNRHVSPPPPQPQPQPTPDPSTKLSYKCSVCDKSFPSYQALGGHKASHRKLAAAAEDQPPSTTTSSAAATSSASGGKAHECSICHKSFPTGQALGGHKRCHYEGNGNGNNNNSNSVVTVASEGVGSTHTVSHGHHRDFDLNIPAFPDFSTKVGEDEVESPHPVMKKPRLFVIPKIEIPQFQ

SEQ ID NO: 2997 - protein, 269 aa, Arabidopsis thaliana
MKAELNLPAGFRFHPTDEELVKFYLCRRCASEPINVPVIAEIDLYKFNPWELPEMALYGEKEWYFFSHRDRKYPNGSRPNRAAGTGYWKATGADKPIGKPKTLGIKKALVFYAGKAPKGIKTNWIMHEYRLANVDRSASTNKKNNLRLDDWVLCRIYNKKGTMEKYLPAAAEKPTEKMSTSDSRCSSHVISPDVTCSDNWEVESEPKWINLEDALEAFNDDTSMFSSIGLLQNDAFVPQFQYQSSDFVDSFQDPFEQKPFLNWNFAPQG

SEQ ID NO: 2998 - protein, 255 aa, Oryza sativa (japonica cultivar-group)
NVDLKDKWRNLSVTAGGYGSRERARVALKGGKRGPKALAEPMDADEKNPDIDDNAIIDAQPLAVVVEPMQLESTPEKEKSVARLDDLILEAIKKLKEPSGSNRTTISSYIEEQYWPPEDFQRLLSTKLKALVATGKLIKVNQKYRIAPSSNSSGGKSIKVYSTGEMNMENNNVRQLSKPQVDAELDKMKSMSKEEAAAFAARAVAEAEAAIAEAEEAARAAEAAEAEADAAKAFLDAVVTTMQNRNHASAMLQAC

SEQ ID NO: 2999 - protein, 393 aa, Oryza sativa
MKPLLFSSPSSCVLGFCLPAATRRARPPASSSAMEPTSSAAMARQTWELENNIPAAASDPDALDAIYRYDEAAQARVQQEKPWANDPHPFRRAKISALALLKMVVHARAGGTIEVMGLMQGKCEGDAIVVMDAFALPVEGTETRVNAQADAYEYMVEYSTINKQAGRLENVVGWYHSHPGYGCWLSGIDVSTQMLNQQFQEPFLAVVIDPTRTVSAGKVEIGAFRTYPKDYKPPDEPVSEYQTIPLNKIEDFGVHCKQYYALDITYFKSSLDSHLLDLLWNKYWVNTLSSSPLLGNRDYVAGQIFDLADKLEQAEGQLAHSRYGMLMPSQRKKEQEESPLAKVTRDSSKITAEQVHGLMSQVIKDILFNSVHPSNKASTSAPDSSGPEPMVEA

SEQ ID NO: 3000 - protein, 274 aa, Brassica oleracea
MMMRKEDLGLSLSLGLSQDHTPLQSQNPNSSISNNLHRFPWNQTFASTSDLGKIDVNSLPRTVDCEEEPGVSSPNSTISSTISGGKRSEREGISEHDEITPDRGYSRGNSDEEEDGGETSRKKLRLSKDQSAFLEGTFKEHNTLNPKQKLALAKKLNLTARQVEVWFQNRRARTKLKQTEVDCEYLKRCVEKLTEENRRLQKEAMELRTLKLSPQFYGQMTPPTTLIMCPSCERVAGPSSNHQHNHRPVPVNPWVACAGQVTHGLNFEALRPRS

SEQ ID NO: 3001 - protein, 106 aa, Triticum aestivum
RSLAGGIIGKGGANIKQISSVTGAKVVIQEDRHESDTSLKNIEFEGTFDQIRNASAMVIELFVSISGIGSNFKTKMCENFVKGSCFYGGKCHFAHGESELRKPAAC

SEQ ID NO: 3002 - protein, 84 aa, Brassica napus
MASNSIISTSRSSTSSWTAKQDKQFEMALAKFEKDTPDRWQNVARVVGGKSAEEVKRRYELLVRDVNDIESGRYDPQPRYRNTN

SEQ ID NO: 3003 - protein, 222 aa, Picea abies
MGRGKIEIKRIENTTNRQVTFCKRRNGLLKKAYELSVLCDAEVALIVFSSRGRLYEFANHSVKRTIERYKKTCVDNNHGGVISESNSQYWQQEAGKLRQQIEILQNANRHLMGDGLTALNIKELKQLEVRLEKGIGRVRSKKNEMLLEEIDIMQRREHILIQENEILRSKIAECQNSHNTNMLSAPEYDALPAFDSRNFLHANLIDAAHHYAHQEQTTLQLG

SEQ ID NO: 3004 - protein, 441 aa, Oryza sativa (japonica cultivar-group)
MATAAVMAAVPSSSPADAAEAVVMTEAVPSLPQRQQPVFVEGRGGKLRDHAYSRKQKSLGLLCSNFVALYNRDDVESIGLDDAARRLGVERRRIYDIVNVLESVGILVRKAKNRYSWIGFGGVPMALRELKERALREKSGLAPLPVEEPSAAIMSDDEDEDKMGDADGDTESEKLSQPVDNPSDNKPGAPRCRLRSDHRKEKSLGLLTQNFVKLFLTMEVDTISLDEAAKLLLGEGHAENSMRTKVRRLYDIANVLSSLNFIDKIQQADSRKPAFRWLGSAGKPKAENGVTIAVPPPGKTISNKRAFGTELTNIDINRSRLDSTIPKKAKLTLSGGEILKNCKLSVQKQLGQGSKGGFVYGPFHPAGARKQELDNGNKGHTDNVQNWESLAASFRPQYQNQALGDLFAHYVEAWKSWYSEFAQGSSMMQQHFGMPVINQFL

SEQ ID NO: 3005 - protein, 562 aa, Arabidopsis thaliana
MDSEEDMLDAHDMESGEDDFYSGGTDDCNDSDDGEPDYGFVEEDADDSAMIASHRSQKNFCVLREEDIRRHQMDNIERVSVVLSITEVEASILLRHFHWSVGRVHDEWFADEERVRKTVGILESHVVPPSDDSELTCGICFDSYPPEKIASVSCGHPFCTTCWTGYISTTINDGPGCLMLRCPDPSCLAAVGHDMVDKLASEDEKEKYNRYFLRSYIEDNRKMKWCPAPGCDFAIDFVAGSGNYDVSCLCSFSFCWNCTEEAHRPVDCSTVSKWILKNSAESENMNWILANSKPCPRCKRPIEKNQGCMHMTCTPPCKYEFCWLCLGAWMDHGERTGGFYACNRYEVAKQEGQYDETERRREMAKNSLERYTHYYERWASNQTSRQKAMADLQQAQMQNLEKLSDKQCTPESQLKFILEAWLQIIECRRVLKWTYAYGYYLPEHEHAKRQFFEYLQGEAESGLERLHQCVEKDLVQFLIAEGPSKDFNDFRTKLAGLTSVTKNYFENLVKALENGLADVDSHAACSSKSTSSKSTGCSSKTRGKGKGSSRTGGSSRNPDDNL

SEQ ID NO: 3006 - protein, 259 aa, Impatiens hawkeri
MARGKIQIKRIENDTNRQVTYSKRRNGLFRKAGELTVLCDAKISILMFSSTSKLHEFISPSISAKQLFDQYQKTVGVDLWSSQYERMQEHLKKLKEGNRSLRTEIRQRMGDCLNELCYEQLVGLEQDMDSSLQRIRDRKFKVLGNQIETHRKKLRNVEQIHRNLLQEFDVREEDVVQVECGVGGLMENMNGHGGGGEYVGGGFHGFGGRSSTTSPRIFAVRTPAPASGNQMMRRSSINLQSSTTAAGVVGSDLTTYALL

SEQ ID NO: 3007 - protein, 217 aa, Brassica napus
MGNQKLKWTEEEEEALLAGVRKHGPGKWKNILRDPEFAGQLSNRSNIDLKDKWRNLSVAPDIQGSKDKVRTPKIKAAAFQLAAVAAASTPSPSSNHSPVPPLPRSGSDLSIDDSCNFMVDAKNAPRYDGMIFEALSSLTDANGSDVTAIYNFIVQKGHEVPPNFKRILGSRLRRLASQGKLEKVSQLKSGTQNFYKMNNHSFMAMRTPLVARPKEVN

SEQ ID NO: 3008 - protein, 640 aa, Oryza sativa (japonica cultivar-group)
MLLVDGEPVSASASPTFGSSRGVRLLGCWRDFFPPRLSPSRFLQGSGGRELVAALMGNPGLRAASERLRAEPERRISSGPEEDDADAAAAAAPRHVYVFQREFATVDPARVELVGTDEVTTCVGVVIRNNKTGILKLRSLCLELVGTDEVTTCVGVVIRNNKTGMTSISHMDFPKIVEGGLKQMLELLGDDNAPFDVVHSAGRKHIKQEGYSYPLCCRILEVLYKSRQQFHLRTFCVLGSNTTTDSYGNTRPIIGGFVVETSSGAVNPASFEMNSRCPDEIVRRIRVSVSSYDPNWQGRLLETYDTHSDAFEIAPACWMPDWAEMASSLNQLSDSEVLLQCSTSPAAEPPHFVENERRIWRYLIENPYWQDTFPKYKPRVFHRTSDGSTSGCPFGSSCHFLHNFPGGYQAAAKMTSHGGTAVAAPPGRMPLGPGAPNGPPTSSVKTRMCNKYNTAEGCKWGSKCHFAHGERELGKPMLLDNSMPHPMGSMPFEAPPMPGPDIVPPSTFGASATAKISVDASLAGGIIGKGGTNTKHISRMTGAKLAIRDNESNPNLKNIELEGTFDQIKHASAMVTELIVRISGNAPPAKNPGRGSHAGGPGSNFKTKLCENFNKGSCTFGDRCHFAHGESELRKPPAAA

SEQ ID NO: 3009 - protein, 102 aa, Arabidopsis thaliana
  misc_feature (45)..(45): Xaa can be any naturally occurring amino acid
SGPTFRKIVFYTYESTNLNENVSNYESKDADYTGLDLAILGFSGXIIFQGAAELYQTYNVGISCDDHVWDLEFASRLPPLHTFSDPLMTNTCPTMSSDMIWG

SEQ ID NO: 3010 - protein, 205 aa, Helianthus annuus
MEKLQNANAVLRRLPPGFRLHPTDEELVVQYLKRRVHSSPLPASIIPEVDVCKSDPWDLPGDSDQQEERFFFSTREIKYPNGNRSNRATQSGYWKATGLSRQIMGANQVGLVGIKKTLVFYKGKPPTGSRTDWIMHEYRLATTQPTQGLEKWVLCKIFLKKRGNYKDEKKNVPVFYDFLATPKVKTSSSSSSGSSGITEESSTNC

SEQ ID NO: 3011 - protein, 298 aa, Zea mays
MGVPKQRWTPEEEAALKAGVAKHGPGKWRTILRDSDFSALLRLRSNVDLKDKWRNLSVTAGGYGSREKARMALKKGRRVVPKLTAEPMDVDEKDMDNAHDTVIDVEPLAMAFEPLPLLESPDKSVARLDDLIVEAIRKLNEPSGSNKAVISGYIEDQYWPPADFQYLLSTKLKSLVNSGKLIKVNQKYRIAPSSSLGGISTKVSSSEGMNTENNNVKRLTKPQVVAELEKMKGMTREEAAAFAAKAVAEAEVAMAEAEEAARVAEAAENDAEAAKAFLDAVILSMRNRNAASMILRAC

SEQ ID NO: 3012 - protein, 285 aa, Triticum aestivum
  misc_feature (221)..(221): Xaa can be any naturally occurring amino acid
  misc_feature (251)..(251): Xaa can be any naturally occurring amino acid
MGRHAGTGGGGGVQQKLRKGLWSPEEDEKLYNHIIRYGVGCWSSVPKLAGLQRCGKSCRLRWINYLRPDLKRGSFSQQEEDAIVGLHEILGNRWSQIASHLPGRTDNEIKNFWNSCLKKKLRQRGIDPSTHKPISGVAGLEPDQASKDERPQAADGLALKQQQQQQQVFDPFPVADTFGAGFDGAGMPLYDHLGGKDAARFVDYSSVLDVSENLGYGESSXHSSNWNSAPEASNALEGEALHWASESKVEXFAGYAGDEDDKFALPWHGQQEHSMAHFDFNLEYF

SEQ ID NO: 3013 - protein, 303 aa, Zea mays
MVMAPAAAQQQRRRDAEAELNLPPGFRFHPTDEELVAHYLCARAAGRRPPVSIIAEVDLYRFDPWDLPERALFGRREWYFFTPRDRKYPNGSRPNRAAGSGYWKATGADKPVEHGGRTVGVKKALVFYHGKPPRGVKTEWIMHEYRLADAGARARARKPGTGTLRLDDWVLCRLYNKKNEWEKTQQQQEKKQNQKQMESEASLSHSHSDTRTPESEIDDDPFPELASLPALDDMMGPAAAAPAGAILPKEEVEDLGGLGGDDWLAGINLDDLQIPGEADFYGSMLVSPMAAKMEQDAAGFPFF

SEQ ID NO: 3014 - protein, 288 aa, Arabidopsis thaliana
MEVMRPSTSHVSGGNWLMEETKSGVAASGEGATWTAAENKAFENALAVYDDNTPDRWQKVAAVIPGKTVSDVIRQYNDLEADVSSIEAGLIPVPGYITSPPFTLDWAGGGGGCNGFKPGHQVCNKRSQAGRSPELERKKGVPWTEEEHKLFLMGLKKYGKGDWRNISRNFVITRTPTQVASHAQKYFIRQLSGGKDKRRASIHDITTVNLEEEASLETNKSSIVVGDQRSRLTAFPWNQTDNNGTQADAFNITIGNAISGVHSYGQVMIGGYNNADSCYDAQNTMFQL

SEQ ID NO: 3015 - protein, 450 aa, Zea mays
MESGSSVRFGHQDVTAAGGVHAGNAGAASSHQQVIPGTGMTMPAGMASLLVGRLGMQAPPGMVLPGGALAAASAGYGGIMSSALRAAWSGAQQQLPPHAGGGIGGHRAQHHKGPWTEAEDVVLREMVMKHGDRKWAVIAQSLPGRVGKQCRERWTNHLRPDLKKSVWTEEDDMALIKAHKRCGNHWSTIATFLPGRSENAVENHWNATKRSLKAKRRLKKKSNAQQVPAGQWSVLEEYIRSLYPDLADGAGADQTPPAAEDSPPSSYNLGSYSYGEVISSPASAAAPPGSFDQMTAMGLYLGASSSSPAPAELQGGMSSDIVAPFLHLDLNAYYGGAPAATMRLMAPMGGMAAPVPQMMEHDHYQHQQASYATANQLLTYPFIDNSVMWQQAPYAAHGSAAYGGGADAAGAGPSNVVAVPADDVDVVQMASREFLTPSEDEVTLDLARFR

SEQ ID NO: 3016 - protein, 249 aa, Taihangia rupestris
MGRGRVELKRIENKINRQVTFSKRRTGLLKKAHEISVLCDAQVGLIVFSNKGKLFEYASDSCMENMLERYERYSYAERRLMEPDFESQGDWTFEYARLKVKVELLQRNLSHYLGDDLDSLSVKEIQSLEQQLDTALKQIRSRKNQLMNESISELQRKEKAMQVQNNLLTKKIQEKEKDVAATQEVHIWEPQQYQHQQNNGFHRLPQPLLPCLNMGGTHQNDQFFQMRGNQLDLTLEPSLYSFNLGCFTS

SEQ ID NO: 3017 - protein, 258 aa, Taihangia rupestris
MGRGKVQLKRIENKISRQVTFSKRRTGLLKKAHEISVLCDAEVALIVFSTKGKLFEYSTNSSMEAILERYEQYSYAERQSMGITDPESQGSWSMEYPKLAARIEILQRKIRNYTGEDLDPLSLRELQSLEQQIDTALKRVRVRKNQVMHDSISEIQKKHRALQEQNNQMSKKLKENEKQSQAVPNNQQSNSTTIVLMAPPPPQAPPPPAPLPALTIGGAFLDRRNAMDEDSDDQQGRAQTRPVSNTGMPLWMVRGLNQ

SEQ ID NO: 3018 - protein, 217 aa, Pimpinella brachycarpa
MVRGKTQMRRIENATSRQVTFSKRRNGLLKKAFELSVLCDAEVALIIFSPRGKLHEFASSSMHETIERYRKHTKDVQSNNTPVVQNMQHLKHETASLAKKIELLEVSKRKLLGEGLGTCSINELQQIEQQLEKSVCTVRARKMQVFKEQIEQLKEKEKTLAADNAILLAKYDVQPRQESPEDGGNLTSTTENSENSDVETELFIGPPEKRFKRIMEK

SEQ ID NO: 3019 - protein, 238 aa, Taihangia rupestris
MGRGKVEIKRIENPTSRQVTYSKRRNGIIKKANELAVLVDAQVCLIMLSSTEKIVEYISPTTTVKKMIDLYQKNLKIDLWSEHYEAMKETLRKLKEVNTKLKREISQRTGQDQLNDLSLTELIDLEENMTTSVAVIRERKYHVIKQQTEKRQKKVRSLEERNRNLIHGYESAVEVDPQFGYVDNDGDFESAVALANGATNLYSFNRVQNNPDDPNLDNGHGGGSAMSSITQLHDLRLA

SEQ ID NO: 3020 - protein, 295 aa, Oryza sativa
MVMVGMMETSPDDGGGGEAMAAAQQTEEDMGPPWLRPLLSTSFFVACASHPELSKNECNLFCLGCTGDALCAYCLPAHRDHHVVQIRRSSYHNVIRVSEVGKLIDISHVQTYVINSAKIVFLNGRPQAMPGKGVTNTCEICCRSLPDSFRFCSLGCKLATLHLDLCRPWHLSLEVSLANMTAQGGVQQANETFSMESLGGMRWDPSLTFAIRPKRGQDSGDGGSGSDYDSFSPKKARRAAAGYDQLGRFDRGMIRWSDDEGSKSNTAPITPTTPPISRCRPSRRKGIPHRAPFYG

SEQ ID NO: 3021 - protein, 203 aa, Picea abies
MECFEEKGKGVQKTRMVRGKTQMKRIENDTSRQVTFSKRRNGLLKKAYELSVLCDAEVALIVFSPRGKLYEFANPSMQKMLERYDKCSEGSNTTNTTKERDIQYLKREIANREERIKILESRQRKMVGEELASCALSDLNLLESQVERGLRHIRARKTQILVAEIEELKRKERISSEENAFHRKSLSILCMRMVPFWQLLQVH

SEQ ID NO: 3022 - protein, 333 aa, Glycine max
MTRRCSHCSHNGHNSRTCPNRGVKLFGVRLTDGSIRKSASMGNLTHYAGSGSAPLHVGLNNPGSPGETPDHAAAAADGYASEDFVPGSSSSSRERKKGVPWTEEEHRMFLLGLQKLGKGDWRGIARNYVISRTPTQVASHAQKYFIRQSNVSRRKRRSSLFDIVADEAADTAMVQQDFLSANELPTETEGNNPLPAPPPLDEECESMDSTNSNDGEPAPSKPENTHPSYPMLYPAYYSPVFPFPLPYWSGYSPEPTKKEETHEVLKPTAVHSKSPINVDELVGISKLSLGESIGDSGPSTLSRKLIEEGPSRQSAFHATPTCGDMNGSAIHAV

SEQ ID NO: 3023 - protein, 232 aa, Taihangia rupestris
MGRGKIEIKRIENTTNRQVTFCKRRNGLLKKAYELSVLCDAEVALIVFSNRGRLYEYSNNSVRETIERYKKACADTSNNGSVSEATTQYYQQEAAKLRNQITALQNNNRNYMAEGLGNMSVKELKNVESKLEKAIGKIRSKKNELLFSEIEYMQKRELDLHNNNQILRAKIAENERHQQSINAIAGGGGAHGSYEIMQSAQSFHEARNYFQVNALQPNHQYSRHDQISLQLV

SEQ ID NO: 3024 - protein, 234 aa, Glycine max; identical to SEQ ID NO: 213

SEQ ID NO: 3025 - protein, 151 aa, Brassica napus
MSNNNNDGVMISNGSLIEHQRQQQQQQQQNLKQSSDGALVVKKPPAKDRHSKVDGRGRRIRMPIICAARVFQLTRELGHKSDGQTIEWLLRQAEPSIIAATGTGTTPASFSTASVSVRGSSTTISTSTNCTLSSSLDHKPFILGKRLREDS

SEQ ID NO: 3026 - protein, 350 aa, Panicum virgatum
PSVKHMFPFCDSSSPMDLPLYQQLQLSPPSPKPDQSSSFFYYPCSPPFAAAADADASFHLSYLQLGSAAAAATPPQAVIDSPELPAQPLMELAPAPATELDAACANAQGAGVSLDRAAAAARKDRHSKICTAGGMRDRRMRLSLDVARKFFALQDMLGFDKASKTVQWLLNTSKAAIQEIMTDDASSECVEDGSSSLSVDGKPNPVELGLMGGGDQQPKGNGRSEGKKPAKPRKAATAPKPPRKSGNAAHPVPDKETRAKARERARERTKEKHRMRWVKLASAIDEAAAASVARDRPSSNNLNHHSSSSNMACAAAELEERCSSTLNNGGSRMQEITGASDVILAFGNGG

SEQ ID NO: 3027 - protein, 263 aa, Brassica napus
NNSPLFNSFHHKKKASLNCPSCFLPERSSVSNILMALEAISSPRLASPVPPLFEDSSRFHGVEHWTKGKRSKRSRSDFPHKNLTEEEYLAFCLLLLARDGDRSNRNPLPPPPVTVAEKSSTYTCSVCDKSFSSYQALGGHKASHRKNLSQTLSGGGDDQSTSTTSAVTTGSGKSHVCSICHKSFPSGQALGGHKRCHYEGNNNSSSSVANSEGAGSTSHVSSGHRGFDLNIPPVPEFSLVNGDDEVMSPMPAKKPRFDFSEKA

SEQ ID NO: 3028 - protein, 302 aa, Oryza sativa
  misc_feature (44)..(44): Xaa can be any naturally occurring amino acid
MGMEAECDRIKGPWSPEEDEALRRLVERHGARNWTAIGRGIPGXRSGKSCRLRWCNQLSPQVERRPFTAEEDAAILRAHARLGNRWAAIARLLPGRTDNAVKNHWNSSLKRKLATATDGGEIDRPCKRVSPGPGSPTGSERSELSHGGCGSGSGGGQVFRPVPRPGGFDAISAADVVRPPRRRDDNDDDGDDDPLTSLSLSLSLPGFHHDSARSHFQELPSPSRSPSPPPSPPAASPSAYPFNADLVSAMQEMIRTEVRNYMAGVGLRAGCGPGAVAESFMPQLVDGVMRAAAERVGVVTRQ

SEQ ID NO: 3029 - protein, 202 aa, Oryza sativa (japonica cultivar-group)
MVRGKVQMRRIENPVHRQVTFCKRRGGLLKKARELSVLCDADVGVIIFSSQGKLHELATNGNMHNLVERYQSNVAGGQMEPGALQRQQVAEQGIFLLREEIDLLQRGLRSTYGGGAGEMTLDKLHALEKGLELWIYQIRTTKMQMMQQEIQFLRNKEGILKEANEMLQEKVKEQQKLYMSLLDLHSQQPTQPMTYGNRFFSI

SEQ ID NO: 3030 - protein, 312 aa, Petunia x hybrida
MIKGVSGNQQLELPAGFRFHPTDEELVQHYLCQKCAGQPICVSIIAEIDLYKFDPWQLPEKALYGEKEWYFFSPRDRKYPNGSRPNRAAGTGYWKATGADKPVGKPRTLGIKKALVFYAGKAPRGIKTNWIMHEYRLANVDRSAGKSNNLRLDDWVLCRIYNKKGTLEKHYNVDNKEDVRFEEVEEDQKPNILTFSQRNEMLTQLAPAPMPPRPQSMPASDYFHFETSDSVTRMHTTNSSSNCSEHVLSSCDKEVQSAPTWEDLESALNYQLNYLDGFQDEPFGPQMQQQNCNIIDQFNPFHDMFMYMQKPY

SEQ ID NO: 3031 - protein, 210 aa, Catharanthus roseus
MYQSNAHNSDHLTFLPPLVDYQFLNNDFDFSEIFTDFNYANYNYNTSTSDNFSGFQFNENCEEIISPNYASEDLSDIILTDIFKDQDNYEDEVVAGEQEEELITTPTSRGGGGGGCEQRSNEEWIRYRGVRRRPWGKFAAEIRDPKRKGSRIWLGTYETAEDAALAFDQAAFQLRGSRARLNFPNLIGSANAPVRVSPRRRSSSCHLRPQ

SEQ ID NO: 3032 - protein, 167 aa, Oryza sativa (japonica cultivar-group)
MDPVWTLSAPWASPVERGAAYWLAGWRPTTLVHLLYTESGRRFEAQLPDLLLGVSSGNLGDLSPSQLAQIDDLQRRTVAEEDGLSREMALVQEGHGAVAVGGGIDVDGIVGRVRGVLGRADALRLRTVKRAVEILEPAQAAELLVAAADMEIGFREFGLKYSSARSD

SEQ ID NO: 3033 - protein, 341 aa, Petroselinum crispum
MALDLMNNNSYKFRSKMEETAVQEAAAAGLQSVENLIKAISQSNHQTAYLSSSSSSETGDTDYRAVTDVAVNKFKKFISLLDKNRTGHARFRRGPVQEKTGVEMLVNPIQNQIQNHGSDGFQVYRPTAVHPVQPVQPVQIQPVQLVQPVQRLPPVPKKENISTTINFAAPAVAVAAPATSFMSSLTGDTDGSGFQITNMSGFSSGSRPVSSLKRKCSSMNDVSAKCSGSSSGRCHCPKKKKLRVKKVVRMPAISMKTSDIPPDDFSWRKYGQKPIKGSPHPRGYYKCSSVRGCPARKHVERAVDDPTMLIVTYEGEHNHSQSSNENTNTSHILESDGLKQS

SEQ ID NO: 3034 - protein, 296 aa, Petroselinum crispum
ERALDGQIKEIVYKGTHDHPKPQPSRRFTAGALISIQEEKAVNASSLTGQGDTTYSQTLSADQNGTPLSSPRGVNADNVDGASPLLNSVTDDIDNDDQFMKRRRTDVGSIDISPVVKPIREPRVVVQTLSEVDILDDGYRWRKYGQKVVRGNPNPRSYYKCTNAGCPVRKHVERASHDPKAVITTYEGKHNHDVPAAKTNSHDVSGSAPISGMSRVRPEDCSPISLDLGVGMNYGVENNGYEQQTTLGSEHVRSQVQASTAPTCYGVANGGIILYGSRDNHVENHNFESPPLGQFS

SEQ ID NO: 3035 - protein, 228 aa, Taihangia rupestris
MGRKIEIKRIENTTNWQVTFCKRRNGLLKKAYELSVLCDAEVALIVFSTRGRLYEYANNSVRQTIQRYKKTCDSSNSGSVTEANVQFYQQEASKLRRQIREIQNSNRHILGEALSTLNVKELKNLEGRLEKGIGRIRSKKNEMLFAEIEYMQKKEIELQNQNNFLRAKIAETDKARQQQTNMMPGTSSAYDQSMPPPQTYDRSFLPVILESNHNYNRQGQNQTPLQLV

SEQ ID NO: 3036 - protein, 240 aa, Arabidopsis thaliana
MDARKRGRPEAAASHNSNGGFKRSKQEMESISTGLGSKSKPCTKFFSTSGCPFGDNCHFLHYVPGGYNAAAQMTNLRPPVSQVSRNMQGSGGPGGRFSGRGDPGSGPVSIFGASTSKISVDASLAGAIIGKGGIHSKQICRETGAKLSIKDHERDPNLKIIELEGTFEQINVASGMVRELIGRLGSVKKPQGIGGPEGKPHPGSNYKTKICDRYSKGNCTYGDRCHFAHGESELRRSGIA

SEQ ID NO: 3037 - protein, 550 aa, Zea mays
MAADDAARSSRRMDLNLYLGLPRAPRARRPDLGFDLALGTPMLSSSSPSSSAASADAPPLETDPLHPPYSPSRADLMRPPTPAHEPYNPFAPEAHPPYVPPPPLPVAGALPVLADELEFGFSDAHLGLVERLDRPSSSTASSSFRPDLAERYRHLMSLGGSRFFRPRRFRSDLPPLSSELPSLENDAAVQPPEPEEPVHDTVEENKVVANGAVVGVSEDDGTEHGKSAPMFECNICFEMADEPVVTSCGHLFCWPCLYQWLHVHSSHKECPVCKGEVTEGNITPIYGRGNSGSEMEKKVAEDGKASGPKIPPRPHGNRLESFRQQFHHLRPISRRLGEAHGFLSTWRRILDRHLANSMSRFEGPPEPSVSETAQHASSLGRMTTRLRARRWQREAENPTSIDSSAPDSGQPVNNTFDLPRRSSNPFPSEGMDLLRHIAFTGLEDSERFATAVSELRRIARASPYGASTSSNPPNPEPFGETQIATALAADQASNSSTMAVIQEDAAFTGSAGEPSNAGSSRPLRRRGSDALGSLDVDGGDLHQNKRRRLN

SEQ ID NO: 3038 - protein, 201 aa, Arabidopsis thaliana
MPTLYKKAGCQFQLTTMEYWSSSFIDGASSSSFISPFYNFDHFSGNQDNRCLGTMMGAQQDILHVPLAMVESGYGEESNSFNGQEKKKKKMTSEQLKFLERSFQEEIKLNPDRKMKLNPDRKMKLSKELGLQPRQIAVWFQNRKARWKNKQLEHLYESLRQEFDIVSREKELLQEELIQLKSMIREDSSCKKKQTWEKACS

SEQ ID NO: 3039 - protein, 241 aa, Eschscholzia californica
MGRGRVELKRIENKINRQVTFAKRRNGLLKKAYELSVLCDAEVALIIFSNRGKLYEFCSSSSMFKTLERYQKSNYGAPETNVSVRESQEHSSHQEYLKLKARVEALQRSQRNLLGEDLGPLSGKELESLERQLDMSLKQIRSTRTQYMLDQLTDLQRREQMLSDANKTLRRRLEEGTVTCHQWEQNMQYGQQQAHAQGEGFFHPIECEPTLQMGYQQDQITVAAAAGPSMTMNSYMPGPGW

SEQ ID NO: 3040 - protein, 505 aa, Arabidopsis thaliana
MSSTFNPAASSPDEEETGEVKIEDQCVENKQSTPASCSSVSEGSAGSSHKSPTIASPATVSPTHRYLGRTSGPIRRAKGGWTPEEDETLRQAVDTFKGKSWKNIAKSFPDRTEVQCLHRWQKVLNPDLIKGPWTHEEDEKIVELVEKYGPAKWSIIAQSLPGRIGKQCRERWHNHLNPDINKDAWTTEEEVALMNAHRSHGNKWAEIAKVLPGRTDNAIKNHWNSSLKKKSEFYLLTGRLPPPTTTRNGVPDSVTKRSSSAQKRVFGSVAQTSSVTTDVNNLAEDGNGQINSSVPVEEVVAASRMTSLNEYARSPQLPNPEPLPENGGAANNGYHLYYTPQIDYYRASEVDTQRMYGNECGCSPSASPVSFFTPPPCRNVHSNGSTPRSPESYLREAGRTYPNTPSIFRKRRPRVVVQDNNNAKKTDEAKEVDQKVNDGKDSSEIQNNGSNAYNLSPPYRIRSKRTAVFKSRQLEFISREEEKADDETKSSEKDMLIDGDSQLLG

SEQ ID NO: 3041 - protein, 167 aa, Glycine max
  misc_feature (145)..(145): Xaa can be any naturally occurring amino acid
MVSKPTDSASKPRKQHGEPANDAIGNLSLKINQLKKQIQAERILCIKEKIQSNEKKLQFHMSGVLSEISTRGSSQPEENRKTPILSSRIDHPLCKFSGFSPVSGDKDHSNQDALSATSIKMPYIETLPPYTSWIFLDRNQRMAEXQSVVGRRRIYYDQHGSEALICS

SEQ ID NO: 3042 - protein, 583 aa, Zea mays
MDADEAVGSSGRMDLNLYLGPPRAPRPRRSDLGSDLALSTPMPSSPSSSAASVDAPPPPPESMHPPYTHSRADLSPPPLPLEVYFPYNPEDSPVPDAHMSYMQPPELLIPGPRNMPPPDSLISGLREGIRELRYAFHPPPPPPPPPPLVRANELLGWEERPSSSTASSSFFPDTAARCGLLLEQTGSRWLRTRRFRSDLPPLSSEARPSGQDATEPVPQHEPAADANELNKVAPNGLELGAPENSSEERSKTATAFECNICFEMASEPVVTSCGHLFCWSCLYQWLNVYSSHKECPVCKGEVTEANITPIYGRGNSDAEKTVEDWKSPGPTIPPRPHGHRLESFWQQFHHIRPISRRLGEAHGILSSWRRLLDQQILGSVSRLEGPSESATQEINDIRQHDHLSGLALASRMRARRFQIEALSRPDGSSTSPPDNGLTGNNPSEILTGNNALLERLAGSNSRRLELLERLAFGIANTAGAMSDDFRRIASPNQYRGSASSSNLQNNEPAVDGARIAGAPSADQASNSSTVAVIQGDGGISESAGEPSNAGSSGSLRRRGRSNASGSLDVDGGSLQQNKRHRMN

SEQ ID NO: 3043 - protein, 300 aa, Oryza sativa (japonica cultivar-group)
MGAPKQRWTAEEEAALKAGVAKHGTGKWRTILRDPEFTALLRLRSNVDLKDKWRNLSVTAGGYGSRERARVALKGGKRGPKALAEPMDADEKNPDIDDNAIIDAQPLAVVVEPMQLESTPEKEKSVARLDDLILEAIKKLKEPSGSNRTTISSYIEEQYWPPEDFQRLLSTKLKALVATGKLIKVNQKYRIAPSSNSSGGKSIKVYSTGEMNIENNNVRQLSKPQVDAELDKMKSMSKEEAASFAARAVAEAEAAIAEAEEAARAAEAAEAEADAAKAFLDAVVTTMQNRNHASAMLRAC

SEQ ID NO: 3044 - protein, 242 aa, Liriodendron tulipifera
MGRGRVELKRIENKINRQVTFAKRRNGLLKKAYELSVLCDAEVALIIFSNRGKLYEFCSTSSMFKTLERYQKCNYGAPEAAVTTREIQSSHQEYLKLKARVEALQRSQRNLLGEDLGPLNGKELDTLERQLDVSLKQIRSTRTQYMLDQLTDLQRREQMLSEANKALKRRLDEGMQANPHQGWNHNPHAMEYVRQQGPPQGDGFFHPLDCEPTLQIGYQTDQITMSTAPGPSLNNYMPGWLA

SEQ ID NO: 3045 - protein, 191 aa, Nuphar advena
DEFCSTSSMLKTLERYQKCNYGSIEASVPSRETQNSYQEYLKLKSKVEALQHSQRNLLGEDLGPLNSKELEHLEQQLEVSLKHVRSTKTQFMLDQLSDLKGKEQILQDANMALVRKLEGAAGSANHQQLSWENGGQHLQYGRHSGPQKDGFYHPLECDSTLQIGYNPTAQEQITVAAPAHNVNGFIPSWLV

SEQ ID NO: 3046 - protein, 184 aa, Brassica rapa
MEHSEESQPQQGVMDYVPPRAYQSGMPSSMAFHHQQLQLFWATQMQEIEQTTDFKNHNLPLARIKKIMKADEDVRMISAEAPVIFAKACEMFILELTLRSWIHTEENKRRTLQKNDIAAAISRTDVFDFLVDIIPKDDLKEEGLGVTKLTMPTVVDSPPYYYLQQQQQQGVWAQGNLEQHHDDQ

SEQ ID NO: 3047 - protein, 237 aa, Acorus americanus
MGRGRVELKRIENNINRQVTFAKRRNGLLKKAYELSVLCDAEVALIIFSNRGRLFEFCSSSSMLKTLDRYQKCSFHAAESSAPSRELQSSYQEYLKLKAKVEALQRSQRNLLGEDLGPLNSKELEQLESQLEMSLKQVRSTKTQYMLDQLCDLKRKEQMLQEANKSLKRKLDEYNSENPLQLSWDNGGSNVPYGRQPTHSEDFFQPLSVDPSLHIGYQVNAAATGQNVNGFIPGWMT

SEQ ID NO: 3048 - protein, 411 aa, Cicer arietinum
MPLKNIVREFKGMKNGIGSKSKRGGDSKHWLCRSKSHVAPDVTPFEPIQQGQWASLPPELLLDIIRRVEESETSWPARAVVVFCASVCKSWRSVTKEIIKTPQQCGRITFPISLKQPGPRDCPIQCFIRRNRESSTFLLYLGLVPSEHESNKLLLVARKIRRATGTEIVISLAADDFSRASNNYVGKLRSNFWGTKFTIYDSQPPHDIIVQPNCRGGKFNSKQVSPRAPACSYLVSSISYELNTLWTRGPRRMHCVMNSIPVSAIEEGGNAPTPTLLPQIFDEPFSPSPALKGKSPMTDSYSGNLSELPELSQGSVEPLVLKNKAPRWHEQLQCWCLNFVGRVTVASVKNFQLVAAVDPSHNVSSEEQERVILQFGKIGKDIFTMDYSYPLSAFQAFAICLTSFDTKPACE

SEQ ID NO: 3049 - protein, 279 aa, Triticum aestivum
MMHRADGLDLGLGLGLGLASQGSITSSTTTAASSSPASASHSQHWTAALSSVIGLRKEEPGVQASTSPESGGTKRGLERTGSGLAAGSDEDDDGGDGTGGRKKLRLSKDQAAVLEECFKTHSTLNPKQKTALANRLGLRPRQVEVWFQNRRARTKLKQTEVDCEYMKRCCEQLAEQNRRLEKEVAELRALKAAPPAHSAAAAAGPLTTLTMCLSCKRVASTSSASACDVPNFSTNAGMGMPMPSPVALPDHRQFFCGYRDTGATYGGFSGLAKVVKPAR

SEQ ID NO: 3050 - protein, 374 aa, Solanum tuberosum
MNYSTYTQFVASRRMGICEPIHQMGMWDDFNASCPSTSATMILEVEKCLEDQIPIIDKRLDIETEDTSHGTVGTSNRYEAETSKPIEKVLRRLAQNREAARKSRLRKKAYVQQLENSKLKLIQLEQELDRARKQGLYVGAGLDASQLSYSGTASSGTAVFDTEYGQWVEEQNRQTNDLRNALHHSQISEAELRIIVDGCLNHYFELFRVKATAAKADVLYIMSGMWKTSAERFFMWIGGFRPSELLKVLTPHLELLTEQQLREVCNLRQSCQQAEDALSQGMVKLHQILGEAVAAGRLGEGNYSLPQMGPAIEKLEALVRFVNQADHLRQETLQQMSRILNTHQAAQGLLALGEYFEQLRVLSSHWATRLHEPA

SEQ ID NO: 3051 - protein, 523 aa, Zea mays
  misc_feature (171)..(171): Xaa can be any naturally occurring amino acid
  misc_feature (219)..(219): Xaa can be any naturally occurring amino acid
MASGGGAVSNKRYRQVSSCTGHDDDSCGTSRRGKTCEAAPRSGRDHDDDGESADGDGSRGHAQETADDGSSSGDEDYMFEYDDDDDDDCEGGAEQTQADAAACDGEQRYAVLTEDDVRARQEADTARVAEVLSIPPGFAAVLLRHFKWRVGRVQEEWFADERRVRGAAGLXAGQLVPAARGLRPRVCAICFDEQPAGQTASAGCSHYYCDGCWRAGAGXRWCGGAGCTRSVELLGGCDAEAVASAVDVVCGCRHAFCWACGEEAHRPVSCATVRAWLLKNSSDSAETANWVVANTKRCPMCRRPIEKNHGCNHMTCGAPCHHQFCWLCLDPWDHHRGCTRYDSRRRRRHGPVDEVEDEEEQAQRTLAKASLDRYLYHYERWEGNGKSLRKALADADDAGAAYRQIADGRRVLRWAHAYDYFLSLDPERDVTKRGLFDDLQNQANRWLECLHASAELERKELFGAGGEAAPVDGEAFRAYRQKVANLTGVTRKFIGNLVRAFETDLSEVVVTLTPPASDLQHIG

SEQ ID NO: 3052 - protein, 533 aa, Zea mays
MGRGDGEGGMATRGGVVGSGAMLGLDMHLAAQQMHPAAAAFQHQQDHHHDGFQLQQPPPPPSFSPYSNTSSSRVVVSAATVGHDEDTVGNGCCGKGGVVVQQQQQQQMAAAGCPWTRMKWTDDMVRLLISVVYSVGDDWEGAAMPGGAGGGKASRAGSSGHGHGHAAAAQQQKKGKWKSVSHAMMDKGFVVSPQQCEDKFNDLNKRYKRVVDLLGRGRACRVVENHALLDAIDELTPKAKDEARKLLSSKHLFFREMCAYHNSGVAGGSHLPPHAGGGAAGDAACLHHPPPVPVAGAASSAARHYQAAPSPPCMKDSSADVADDEDDSDAVSDNGEEDEDDYDEEDDGHMYHSHLTSRQHSGGGRRRGKREHGEDSAAAEDLEDEAAGGGKRARTGAAPDPSAMLQQLKSELAAAAAAAMDPQQARCWVRRRAVEVEEQQILLESHAYDLERQRLKWDRFRANKERDMERARLQNDRLRIQSRRLLLMLRHKEVELDMAEANSSSVDHHPGASPLAAHQQTIGSSPSTAGHPN

SEQ ID NO: 3053 - protein, 208 aa, Oryza sativa (indica cultivar-group)
MARGKVQLRRIENPVHRQVTFCKRRAGLLKKARELSILCEADIGIIIFSAHGKLYDLATTGTMEELIERYKSASGEQANACGDQRMDPKQEAMVLKQEINLLQKGLRYIYGNRANEHMTVEELNALERYLEIWMYNIRSAKEGMLKAANEILQEKIVEQNGLIDVGMMVADQQNGHFSTVPLLEEITNPLTILSGYSTCRGSEMGYSF

SEQ ID NO: 3054 - protein, 304 aa, Petunia x hybrida
MTTAELQLPPGFRFHPTDEELVMHYLCRKCASQPIAVPIIAEIDLYKYDPWDLPDLALYGEKEWYFFSPRDRKYPNGSRPNRAAGTGYWKATGADKPIGHPKAVGIKKALVFYAGKAPKGEKTNWIMHEYRLADVDRSARKNNNSLRLDDWVLCRIYNKKGSIEKNQLNNKKIMNTSYMDMTVSSEEDRKPEILPPLPPQPAPQQQQVYNDFFYLDPSDSVPKIHSDSSCSEHVVSPEFTCEREVQSEAKLSEWEKAALDLPFNYMDATTGATTLDNSLLGSQFQSSYQMSPLQDMFMHLHKPF

SEQ ID NO: 3055 - protein, 199 aa, Oryza sativa
  misc_feature (28)..(28): Xaa can be any naturally occurring amino acid
  misc_feature (130)..(130): Xaa can be any naturally occurring amino acid
MEGAGAARKRSRPDTANGGAAGGKRSRXTIGCPFGEGCHFSHFVPGGYQAVAKTLNLGNPAVPAPARAPMDHAAGGNSHPASSGKTRMCTKYNTAEGCKFGDKCHFAHGERELGKPAYMSHESAMAPPMXGGRYGGRPEPPPPAAMGPPAGNFGASATAKISVDASLAGGIIGKGGVNTKQICRVTGVKLSKRDHESDS

SEQ ID NO: 3056 - protein, 331 aa, Triticum aestivum
  misc_feature (160)..(160): Xaa can be any naturally occurring amino acid
  misc_feature (182)..(182): Xaa can be any naturally occurring amino acid
  misc_feature (207)..(207): Xaa can be any naturally occurring amino acid
  misc_feature (216)..(216): Xaa can be any naturally occurring amino acid
  misc_feature (227)..(227): Xaa can be any naturally occurring amino acid
  misc_feature (252)..(252): Xaa can be any naturally occurring amino acid
  misc_feature (267)..(267): Xaa can be any naturally occurring amino acid
  misc_feature (284)..(284): Xaa can be any naturally occurring amino acid
MEMTVNGRDTEHHLGLGLGLGLSLGMSGTTSPVEPAAPQHAVTAAAPSTLGRQQQLSWNGAGLFFPASSGEQRSHADDRRLAALACHEMPFLRGIDVNRAPATGGARGSCAASEDEEPGASSPDSTLSSLSGKRGAPTRSGGGEQERAGAGSDDEDHHRXGGAGSRKKLRLSKDQSAVLEDXFKEHSTPHPKQKAALARQLGLRPRXQVEVWFQNXRRARTKLKQTXEVDCESLKRCCETLTEENRRLQREXQELRAAQAARPAGAXNLYMRAPPPTTLTMCPXSCERVAPSGKPVVDESRAAMVTRAVPTGPWGPVPVLPVFLGRPAQRS

SEQ ID NO: 3057 - protein, 504 aa, Oryza sativa (japonica cultivar-group)
MATAGSRKGGRGRKALTAVLDNDANISAGKADVAAAAGILSPPQKAKRATSKSSKGKAAAAAAAEEQASVVDAVSELQGMLEELRLEKEKAEEMVRERDEVIRRKEEEQGRLQAELKKVQRAKEFKPTVSIPLVKALIEKDQEGEKKKGKGKAGHERKKPCPAYVLWCKDQWNEIKKESPDADFKEVSNALGAKWKALGAEEKQPYEERYRQEKEAYLQVVGQEKREAEAMKLLEEEQMQRTAKELLEQYLKFRQEADDDGDGGDNKKASKKGKKKKKEKDPSKPKQPMSAYFVYTQQRRAALVAEKKNVPEIGRITGEEWKAMSEAEKAPFEAAARKQREEYQVEMAAYRQRKQEEAACQEKEEEEQKKIMKQEALQLLKKKEKTDNIIKKTKEEQRKKKVGGAAAAADPNRPKKPASSFLLFSKEARRQLAEERPGVASSTLTALVSVKWKELGEAEKQAWNGKAAEAMAAYKRDMEEYTKAAASGGGGGDASPCTSSSASS

SEQ ID NO: 3058 - protein, 438 aa, Oryza sativa (japonica cultivar-group)
MAAAGNSFLNQELVKVADGVSDWHLPSSSHGGTCHTNTRGAPITVGVPDLGCPVSSIGMATSSSLMPKEGLTTASYNSVVAFPVGATMVPQQQQTQAAGSNDNPGLVKGGWTREEDEVLRQMVRHHGDRKWAEIAKSLPGRVGKQCRERWTNHLHPDIKKDIWTEEEDRMLIEAHQTYGNSWSAIAKQLPGRSENTIKNHWNATKRSLNSKRRLRKKNSEQTVPGQPSLLESYIRSCQHMLPSETVPPPPAPFDISRYGNSGVIGASPTLPVVQEPGTSTPPGLVMFLDLLNQAIPHPPQPETMDLFNMTPEVSHLNTSGYCLQLDAGGNLYYGRLPAPAPVQPHGISTQELQDTPQLSLYYPLSSFAGSHTDGTVEFNHQLSNPNGGHYGEEAGPSSVATGGSANGMDDNDVVQMASNQFMMPSEDEGILDLARWIN

SEQ ID NO: 3059 - protein, 366 aa, Capillipedium parviflorum
PSVKHMFPFCDSSSPMDLPLYQQLQLSPPSPKPDQSGSFYCYPCSPPFAAAAAEASFHLSYQIGSAAAATPPQAVIDSPDLPVKPLMEQAPAPATELAACASGAQGAGVSLGLDGAPAAARKDRHSKICTAGGMRDRRMRLPLDTARRFFRLQDMLGFDKPSNTIEWLLREAGLAIQALNMANDVDASSECVEDGSSSLSVDAKQHNPAEQLGGGGDQKPKGNGRSERKKPAKSRKTATTPKPPRKSGNNAHPVPNKETRAKARERARERTEEKHRMRWVKLASAIDVEAAAATSVASDRPCSNHLSHHHHHHSSSSSSMNMPRAAVADELQERERCSSSALNNRGRTMQEITGASDVVLGFGNGG

SEQ ID NO: 3060 - protein, 199 aa, Zea mays
MRRAKPPPQQPSPSPEIRYRGVRRRPSGRYAAEIRDPAKKTPIWLGTYDCAEAAAHAYDAAARSLRGPTARTNFPSAAVRAPRHRAPSASASAAAAAPAAVPATSSHSSTVESWSGGAPRVAAPPRSAAAPMEEDDDEDCHSYCGSSSSVLCEDARGDDDDDAAASHAPLPFDLNLPPPIDAAAEADQMGARYDTLLHL

SEQ ID NO: 3061 - protein, 237 aa, Persea americana
MGRGRVELKRIENKINRQVTFAKRRNGLLKKAYELSVLCDAEVALIVFSTRGKLYEFCSTASMLKTLERYQKCNYGAPETTVSSRELQSSHQEYMKLKARVEALQRSQRNLLGEDLGPLTGKELDTLEKQLDVSLKHIRSTRTQYMLDQLGDLQRREHMLSEANKSLRRRLEEGMQENPNHAWDPNGYVRQQAPPQSDGFFHPIECEPTLQIGYQSSQITIAAPGPNVNNYMPGWLA

SEQ ID NO: 3062 - protein, 500 aa, Oryza sativa (japonica cultivar-group)
MAQFGGFGGWSAMDVAAAAAAALGNVSGAVYHADPAAAVYASLVPGMAVVPGRAPPSAVQIEAARRWKELEKMALRSVNLMVTCAGAIQAGDYAAAAGSLSDAREIFAKMPTTRTGIGRVLTHFADALAERLFPAFPQSAPPPPPPRGEQRELFRGFYEAGPYLKFAHLAANQAILEAFEGCNSVHVIDFALTDGIQWPSLIQALAVRPGGPPFLRITGIGPHAAGNRDELRDVGLRLAEFARSCSVPFAFRGIAADQLDGLRPWMFQVAPGEAVAINSVLQLHRLLVDQDAAAAASFPAPIDGVLDWVASMNPRVFTVVEQEADHNKSSLLERFTNSLFYYASMFDSLEAISRHGGGDGAGNPLAEAYLQGEIADIVSREGSSRVERHEQMPRWVERLRRGGMTQLPLGATGLWQAAMQLREFSGAGFGVQENGGFLTLTWHSQRLYSASAWRATAGKKMTMMASGAADAMEESQNSNTNGGGGGSSGGGHGALNQIMQ

SEQ ID NO: 3063 - protein, 356 aa, Sorghum matarankense
PSVKHMFPFCDSSSPMDLPLYQQLQLSPPSPKPDQSSSFYCYPCSPPFAAATADASFHLRYQIGSAAAANPPQAVINSPDLPVQPLMEQAPAPATELGACASGGAQGAGVSVGLDRAAAAAAAAARKDRHSKIRTAGGMRDRRMRLSLDIARKFFALQDKLGFDKPSKTVQWLLNVAKPAIQKIMVADDVDVSSECVEDGSSSLSVDGKHNSAEQLGGGDQKPKGNGRSEGKRPAKSRKAATTPKPPRKSGNNAHPVPDKETRAKARERARERTKEKHRMRWVKLASAIDVEAAAASVASDRPSSNHLSSSTNMPRAAAAELEEMERCSSTLNNRGRMQEITVLGSDVALGFGNGG

SEQ ID NO: 3064 - protein, 242 aa, Persea americana
MGRGRVELKRIENKINRQVTFAKRRNGLLKKAYELSVLCDAEVALIIFSNRGKLYEFCSSSSMLKTLERYQKCNYGAPETTVSTRETQSSHQEYLKLKARVEALQRSQRNLLGEDLGPLTSKELDTLEKQLDASLKQIRSTRTQYMLDQLADLQRREQMLSEANKNLKRRLEEGMQANPQVWDPNGHPVTYGRQQAPPQSDGFFHPLDTCEPTLHIGYQPADQITIAAPGPSVNNYMPGWLA

SEQ ID NO: 3065 - protein, 365 aa, Arabidopsis thaliana
MTRRCSHCNHNGHNSRTCPNRGVKLFGVRLTEGSIRKSASMGNLSHYTGSGSGGHGTGSNTPGSPGDVPDHVAGDGYASEDFVAGSSSSRERKKGTPWTEEEHRMFLLGLQKLGKGDWRGISRNYVTTRTPTQVASHAQKYFIRQSNVSRRKRRSSLFDMVPDEVGDIPMDLQEPEEDNIPVETEMQGADSIHQTLAPSSLHAPSILEIEECESMDSTNSTTGEPTATAAAASSSSRLEETTQLQSQLQPQPQLPGSFPILYPTYFSPYYPFPFPIWPAGYVPEPPKKEETHEILRPTAVHSKAPINVDELLGMSKLSLAESNKHGESDQSLSLKLGGGSSSRQSAFHPNPSSDSSDIKSVIHAL

SEQ ID NO: 3066 - protein, 490 aa, Oryza sativa (japonica cultivar-group)
MAALRQGDDPAIKLFGRTIPLLLDPPAAAAAAADEVMPNLGNGVKTNNDLPLVSDKLLIVKGIPFCPNNSKKNDLQGISRPDGRIEIDSMTEDVKTEPDGSVPEKILKKPDKILPCPRCNSMETKFCYFNNYNVHQPRHFCRNCQRYWTAGGAMRNVPVGAGRRRNKHVSKYCQAMMTCNNTVAPGDVSDVVHHQVITHGSSLLPATLKENETPTEFISEVPPCKSSASILDIGEPNDTDLVPLASGDNKEEKSCASSVVVSSCSENLMPDNAIMKEPNNRSGCCNGVALPFPTGPALVLPWSLGWNSVALMPATQCSMQPVLGLKDGIPCPPSWPPQLMVPAPGICTPVVPIPLVPPLWSCFPGWPNGMWNAQCPGGNTTVLPSTAPNKISCSGSSSLVLGKHSREESLQEEEKTRNYLWVPKTLRIDDPAEAAKSSIWATLGIKPDDKGIFKSFQPNVAKNGTAPESPQALQANPAAFSRSQSFQETT

SEQ ID NO: 3067 - protein, 295 aa, Medicago sativa
MGNTNSSHNLLITVTVFAVTVTVFFILYFILRRRRFSPSSSSTVRVSPVTPTSSTSSSVVDSLPIFTFSSIKRRSSTVVSGDCAVCLSKFEQNDLLRLLPLCCHAFHTECIDAWLASNQTCPLCRSSVFVSESEIMKIFRSSSTSSGNNSFRLEIGNISHRREATATDNNNNNNNVAGETDRRTYSVGAFDYFVDEEAEIPVGNTNRRIFSGEKDDAAVLSVEVETPVDSQASLIGEGNWLKDYVDGLTRVMSFRGSGSSRRNDVVAGVGDFDVEANGNGFGEEISEMFRWISGV

SEQ ID NO: 3068 - protein, 332 aa, Oryza sativa (japonica cultivar-group)
MDVEFFADLDLDALLASFSSSAAAAGSGVSGLFAPSPPHDAEAGSPESVSSRRPSPSREAALSEIERFLMEEGPAAEEGVGAEDFFDALLVDGGEEEEEEEGKGSEAGGSTDGDSGKENEVATPDAEKEDVEAEVDGDDPMSKKKRRQMRNRDSAMKSRERKKMYVKDLETKSKYLEAECRRLSYALQCCAAENMALRQSLLKDRPVGAATAMQESAVLTVCLSHNPDAPTVYLCHKPDAKGNLFLFAETLPLVSLLWLVSIVCLLPVPGLPNRNPVARSSAGRDLATVTGKKTSSEQQLEETLLLHGRRCKGSRARIKLDTGPFRLAAAAC

SEQ ID NO: 3069 - protein, 532 aa, Oryza sativa (japonica cultivar-group)
MGMSPEPCNSISDCSQQQSHHLTLTQQQDSTIICTNQELDYYYRFYDVDEAAFDGNEVELVSRFSKVTRMDHMISSPYQPTWSPAQAAVDVVGSSETSRVRKKRFWDVLESCKQKVEAMEAMDTPATATFRVGAGDGGGGGGGGAGGGGGGADGMRLVQLLVACAEAVACRDRAQAAALLRELQAGAPVHGTAFQRVASCFVQGLADRLPLAHPPALGPASMAFCIPPSSCAGRDGARGEALALAYELCPYLRFAHFVANACMLEAFEGESNVHVVDLGMTLGLDRGHQWRGLLDGLAARASGKPARVRVTGVGARMDTMRAIGRELEAYAEGLGMYLEFRGINRGLESLHIDDLGVDADEAVAINSVLELHSVVKESRGALNSVLQTIRKLSPRAFVLVEQDAGHNGPFFLGRFMEALHYYAALFDALDAALPRYDARRARVEQFHFGAEIRNVVGCEGAARVERHERADQWRRRMSRAGFQSVPIKMAAKAREWLDENAGGGGYTVAEEKGCLVLGWKGKPVIAASCWKC

SEQ ID NO: 3070 - protein, 381 aa, Oryza sativa
MRSSLAVDRPTRPYPLPAQRPNRLPAPPVSGTGIASPRMGMGRGGAVQCTARAGAATTTTTMGEWIVPGPHVNDEEENDNGPGIRGPWSPEEDEALRRLVERHGARNWTAIGREIPGRSGKSCRLRWCNQLSPQVERRPFTAEEDATILRAHARLGNRWAAIARLLQGRTDNAVKNHWNCSLKRKLAVATTTTTTTTGAAAAPGVVADAAELVERPCKRFSPTPDSPSGSGSGSDRSDLSHGGGFGQIFRPVARTGAFEPVDCAISRRQEEDPFTSLSLSLPGTDQRFNHDSAHSHFQELPSSPSPPPPPPPAAAASTTQYPFTPEFAAAMQEMIRAEVHKYMASVGVRAGCGDAGGADLHMPQLVEGVMRAAAERVGRMH

SEQ ID NO: 3071 - protein, 351 aa, Ostreococcus tauri
MAHAAFGTSPGSFGASPTFYGSSPTAIPQVSRPMAQPERGLGFPGLSSSLPGKHHIGSPNSGFSAFSPPMNMKDSPRSLASFSSSPPVRSGGVHKPSTSVTKVKRMELARAAVSEATAAAQAVASLPNAAAVSSPPLNSSGKPQKSVYRGVRQRPWGKYAAEIRDPTRGSRLWLGTFDSAEEAALAYDAAARAIRGDAAVTNFGKDVPIPASVRSQLPPLPTRPVQGRGGGIPRDDSALSGRMSKLSTSTKPANLEEEAEMLLMLQGADSGKGSTPERSESIEDGAGGMDLDEDNGASSVTVGLTLRAQKSNAQPIAPMASMPRETGDTSNAMISALKASNVSTRPRRGNA

SEQ ID NO: 3072 - protein, 410 aa, Picea abies
MSMPKLCDVCQVSNSVLYCRAHTAQLCLVCDVKIHGGSKASLCHERVWVCEVCEQAPAVVTCKADAAALCVSCDTDIHSANPLASRHERAPVIPFYECPNMPNNNTATNANNDNLDCNVLLNEDGGGDDPLKHDYVDDDYDDYDDDENDHNNLLNHQEDDNDAEICCAEEAATASWLIPEANRNNLTNINGGNSEGEDKMVKDKLKFKAYMQSIDFLQDVENYVDLEYLGTTTTITTPTTPTAHMGADSMVPVHTPEVIEHSSTKVSVETARSLDVDAASKCNYVYRTTSLNHCVSSSSIDVGIVPDSNTTTDISTPYHDPRGVFEIPPRVVHPGGHVEVMGREARVLRYREKRKNRRFEKTIRYASRKAYAETRPRIKGRFAKRTEVEVEQIYSSSLLPDQGYGVVPSY

SEQ ID NO: 3073 - protein, 410 aa, Picea abies
  misc_feature (152)..(152): Xaa can be any naturally occurring amino acid
  misc_feature (155)..(155): Xaa can be any naturally occurring amino acid
MSMPKLCDVCQVSNSVLYCRAHTAQLCLVCDVKIHGGSKASLCHERVWVCEVCEQAPAVVTCKADAAALCVSCDTDIHSANPLASRHERAPVIPFYECPNMPNNNTATNANNDNLDCNVLLNEDGGGDDPLKHDYVDDDYDDYDDDENDHNXLLXHQEEDNDAEICCAEEAATASWLIPEANRNNLTNINGGNSEGEDKMVKDKLKFKAYMQSIDFLQDVENYVDLEYLGTTTTITTPTTPTAHMGADSMVPVHTPEVIEHSSTKVSVETARSLDVDAASKCNYVYRTTSLNHCVSSSSIDVGIVPDSNTTTDISTPYHDPRGVFEIPPRVVHPGGHVEVMGREARVLRYREKRKNRRFEKTIRYASRKAYAETRPRIKGRFAKRTEVEVEQIYSSSLLPDQGYGVVPSY

SEQ ID NO: 3074 - protein, 366 aa, Bothriochloa odorata
PSVKHMFPFCDSSSPMDLPLYQQLQLSPPSPKPDQSGSFYCYPCSPPFAAAAADASFHLSYQIGSAAAATPPQAVIDSPDLPVKPLVEQAPAPATELAVCASGAQGAGVSLGLDGAPAAARKDRHSKICTAGGMRDRRMRLPLDTARRFFRLQDMLGFDKPSNTIEWLLREAGLAIQALNMANDVDASSECVEDGSSSLSVDAKQHNPAEQLGGGGDQKPKGNGRSERKKPAKSRKTATTPKPPRKSGNNAHPVPNKETRAKARERARERTEEKHRMRWVKLASAIDVEAAAATSVASDRPCSNHLSHHHHHHSSSSSSMNMPRAAAADELQERERCSSSALNNRGRTMQEITGASDVVLGFGNGG

SEQ ID NO: 3075 - protein, 178 aa, Zea mays
MATTHDDCVSLCLMALAAAGGGGMTTQSYAPSTAAWTTQECELRFRCSVCGKAFASHQALGGHKASHRKPTHLQTQQASSSSVTTSSAGSGGGQGRHRCSVCHRSFATGQALGGHKRCHYWDGLSVSLTASGSGSTVKGFDLNLMPATRWGEEEEVQSPLPIKKRRLSGPSLDLSLTI

SEQ ID NO: 3076 - protein, 242 aa, Syringa vulgaris
  misc_feature (188)..(188): Xaa can be any naturally occurring amino acid
LVQLRRMENKINRQVTFSKRRNGLLKKAYELSVLCDAEVGLIIFSSRGKLYEFGSAGMTATLERYQRCCFNPQNAGAGAERETQSWYQEVSKLKAKYESLQRTQRHLLGEDLGPLNVKELENLEKQLEGSLSQARQRKTKIMMEQMEDLRRKERQLGEMNKQLKIRVSLELSSHETEGQGLRGFPCQXNAAASAGTSNFMAQPGTNPMEFEPEPVLQMGYHHYNLGEGPLFQDHGYRSFDLF

SEQ ID NO: 3077 - protein, 348 aa, Candida albicans SC5314
MNEDPQSEIMERYNESAYLRDDQLPQFDQNNDVIKEEQTHTQDHHHQHPSVSGSHSDELQDQDIHNVIEEHEDHVSTQNIVDEDELLAAQAAAEAAAAAQQQQPGDVFNNVAQGLSGKHRDMMMQYWQETINSIEHDEHDFKNHQLPLARIKKVMKTDEDVRMISAEAPILFAKGCDVFITELTMRAWIHAEENKRRTLQKSDIAAALTKSDMFDFLIDVVPREEEKPKKSNNNSSRSDSYVNNQQSPPIPETEEEVPHMLTQDVKHSHQDVLQQQMLQEQLLQQQLHQEVQQQLQQEVQRQLQEDVPQSDHQQASQREEDITNGAENANGHNDEATYENFNGYQNNY

SEQ ID NO: 3078 - protein, 237 aa, Zea mays
MSCAGQAGGWLLDYALVEEEIQGSEFIYMVDDPAVSSVILGFDAPRKEDGVQDNPGAKKRSRPESSAPPGTKACREKLRRDRLNERFNELCAILEPGKPPKADKVAILSDAARLLNQLQGEAQKLKQSNESLQESIKSLKAEKSELRDEKTRLKAEKERLEQMLKGVVSHAAVAAPGPFVPHPAAVAPSFHHHPAAFAQAGKFVPYPSYPPPAAFWQWIPPTSLDTTKDPAHWPPVA

SEQ ID NO: 3079 - protein, 87 aa, Zea mays
MSESRSSFRNVNTDCNWSKKENKLFEEALARYREGTPDRWLKVSRAMGGIKTADEVRRHYEILNEDVTLIVSGGIPFPNYNTQGAWN

SEQ ID NO: 3080 - protein, 241 aa, Tradescantia virginiana
  misc_feature (228)..(228): Xaa can be any naturally occurring amino acid
VQLKRMENKINRQVTFSKRRGGLLKKAHEISILCDAEIALIIFSTKGKLYEYATNSKMDNILERYERYSYAEKALTSSDPDIQGNWCQEYAKLKSKVEALCKSQRHLMGEQLETLNLKELQQLEQQLEGSLKHVRSRKTQVMLDSISELQRKEKSLEEQNKNLEKEILEKQKIKALAQQAHWEHQNQPAPRGSPPRPFVIAESHPTLNIGHFQGRTNAVEAEENQQPXMRICSSLLPPWML

SEQ ID NO: 3081 - protein, 228 aa, Arabidopsis thaliana
MFDFKIFTFSFAQSKYLENIREKTLTEVSTSDIELLRRNSQPFRRATPCSLTVDLQANSFTPKLQSYLMMMPGRNKRKERSWPEPQTQPQSEIPSSSSSLAADNMSPPSTIAYVLPPGFKFMPNDKEVINCYLKPYSDGNTNVLLNVPIHRVNIYESNPQTLSGRNVATLTEDIGTQKWLPKRFKAGDGVVGNKRPLAYYVGKPSEGVKTDWLMQEYSLDHSSHNTTR

SEQ ID NO: 3082 - protein, 222 aa, Tradescantia virginiana
  misc_feature (11)..(11): Xaa can be any naturally occurring amino acid
  misc_feature (218)..(218): Xaa can be any naturally occurring amino acid
  misc_feature (221)..(221): Xaa can be any naturally occurring amino acid
GLVKKAHEISXLCDAEVALIIFSTKGKLYEYATDSKMENILERYERYSYAEKALTSSDPELQGNWCQEYVKLKAKVEALHKSQRHLMGEQLEALDLKELQQLEHQLEGSLRLVRSRKTQMMLDSISELQRKEKSLEEQNKNLEKEILEKQKEKALAHQAHWEQQNQPLQSTNSPPRPFVIAETHPTLNIGNFQGRTNTVHAEESLQRQMRISSSLLPXWMXH

SEQ ID NO: 3083 - protein, 206 aa, Acacia mangium
VLCDAEVALIVFSTKGKLSHYSSDPCMEKIIERYERYSYAERPQAAPDRSPTENWTLEHAKLKARMEVLQRNQKHYRGEDLEGLSLKELQNLEHQLDSALKHVRSRKNQLMYESISEFQKKDKKLQEQNNLLAKEIKEKEKALAEKAREEKHNDEDALVQPQLPPSNIGEIVEARGGAEDNEATTTHHQPRSGPLLPSWMLPPISE

SEQ ID NO: 3084 - protein, 199 aa, Tradescantia virginiana
GLVKKAHEISVLCDAELALIIFSPKGKLYEYATDSKMEIILERYERYTYAEKALIASDPDVQGNWCHEYIKLKAKFEALNKSQRHLMGEQLDTLNQKELLQLETKLEGSLKNVRSRKTQLMLDSISELQEKGKSLQEQNTCLEKEILGKQKDKAPKQHVQWEKQNQPPPTSSAPMPFLIGDIHPTPNIRNFQGRTVADA

SEQ ID NO: 3085 - protein, 113 aa, Glycine max
AGLLKTQRPSLKGGKEIKQHRYAFQTRSHVDILDDGYRWRKYGEKAGGNNKFPRNYYRCSYRGCNVKKQIQRHSKDEEIVVTTYEGIHIHPVEKSTESFEQILRNHHIYSLTL

SEQ ID NO: 3086 - protein, 285 aa, Brassica napus
MSELQLPPGFRFHPTDEELVMHYLCRKCASQSIAVPIIAEIDLYKYDPWELPGLALYGEKEWYFFSPRDRKYPNGSRPNRSAGSGYWKATGADKPIGLPKPVGIKKALVFYAGKAPKGEKTNWIMHEYRLADVDRSSAARKKKNSLRLDDWVLCRIYNKKGAIEKRGPPPTPVVYGDEVVEEKPRLSEMGMPPPPVMPNDFVYFDTSDSVPKLHTTESSCSEQVVSPEFTSEVQSEPKWKDWSGEKSSLDFGFNYIDATAFGGGGGSNQLFPLQDMFMYNMPKPY

SEQ ID NO: 3087 - protein, 504 aa, Schizosaccharomyces pombe 972h-
MSDLLDDEFYEEEFENDLLDASEFEDEFDEDAEIDDDGFTVERKRRRAHSVSYRVVSVRDLRASLNEKINQLTSIIDLTREQVLGLYRYFKWNRERLLERYIDAPEESLQKAGVGLSGSKQREVVHHEGTCEICYDEGCLPFFSAECDHEFCLACYRQYLDSRISEGESVIQCPEESCTQIVSIQSITKVLDEKSLDRYHRLLDRSFVDDNDHLRWCPAPDCEFAIECHVTQASLSSVVPTVTCNCGKQFCFGCGHDNHQPTICPLVKIWLQKCQDDSETANWIHANTKECPKCSTTIEKNGGCNHMTCKKCKYEFCWVCLGPWTEHGNNWYTCNRYEEKSSTSARDSQSKSRASLERYLHYYNRFANHEQSAKLDHELYEHTHKRMTQMQVDSNLSWVEVQFLKNAVDILFQCRQTLKWTYAFAYYLARNNQTEIFEDNQRDLELAVENLSELCERPCQDCSLSVFKQRVLDKTVYVRSRRDVLLDDTARGLAEGRWEYVVDV

SEQ ID NO: 3088 - protein, 330 aa, Glycine max
MEGRENFGVVVGDEAPESFHVAPRIENNLDFSRATVPAPAPATEGKKKRGRPRKYGPDGKPALGAVTALSPMPISSSIPLTGEFSAWKSGRGRPVESIKKSSFKFEVESPGPVEGIAYSVGANFTPHVLTVNAGEDVTMKIMTFSQQGSRAICILSATGTISNVTLRQPSSCGGTLTYEGLFEILSLSGSFMPTENGVTRSRSGGMSVSLAGPDGRVMGGGLAGLLVAAGPVQVVVASFLPGHQLEHKTKKQRVEHVSTISPSPVNLITSEEIKVSFGGVKPIMTPAAFQEENIASFNNVQDSRNSSADDKDPLPEKESNLSQSNAEAAC

SEQ ID NO: 3089 - protein, 215 aa, Glycine max
MSSSSSSFFPAHITTDQEFSLIVAALTNVVSGSTSSSSVPEFRFPHSSPPLSSASLMPPPPPSIHTCRECNIAGCLGCNFFPEEQRKKYRGVRQRPSGKWAAEIRDRHRSARVWLGTFETAEDAARAYDKASFELRGPRAKLNFPLVDESLTLQPEMAATEEQINNEDNLNQGMGMDSHEFWDRINEADFHPFMMMMDFTGDSSDSAATGYTLSS

SEQ ID NO: 3090 - protein, 410 aa, Picea abies
  misc_feature (245)..(245): Xaa can be any naturally occurring amino acid
  misc_feature (389)..(389): Xaa can be any naturally occurring amino acid
MSMPKLCDVCQVSNSVLYCRAHTAQLCLVCDVKIHGGSKASLCHERVWVCEVCEQAPAVVTCKADAAALCVACDTDIHSANPLASRHERAPVIPFYECPNMPNNNTATNANNDNLDCNVLLNEDGGGDDPLKHDYVDDDYDDYDDDENDHNNLLNHQEDDNDAEICCAEEAATASWLIPEANRNNLTNINGGNSEGEDKMVKDKLKFKAYMQSIDFLQDVENYVDLEYLGTTTTITTPTTPTAHXGADSMVPVHTPEVIEHSSTKVSVETARSLDVDAASKCNYVYRTTSLNHCVSSSSIDVGIVPDSNTTTDISTPYHDPRGVFEIPPRVVHPGGHVEVMGREARVLRYREKRKNRRFEKTIRYASRKAYAETRPRIKGRFAKRTEVXVEQIYSSSLLPDQGYGVVPSY

SEQ ID NO: 3091 - protein, 193 aa, Cucumis sativus
  misc_feature (193)..(193): Xaa can be any naturally occurring amino acid
TGDEGNNEYKKGLWTVEEDKILMDYVKAHGKGHWNRIAKKTGLKRCGKSCRLRWMNYLSPNVKRGNFTEQEEDLIIRLHKLPGNRWSLIAKRVPGRTDNQVKNYWNTHLSKKLGIKDQKTKQSNGDIVYQINLPNPTETSEETKISNIVDNNNILGDEIQEDHQGSNYLSSLWVHEDEFELSTLTNMMDFINX

SEQ ID NO: 3092 - protein, 410 aa, Picea abies
MSMPKLCDVCQVSNSVLYCRAHTAQLCLVCDVKIHGGSKASLCHERVWVCEVCEQAPAVVTCKADAAALCVACDTDIHSANPLASRHERAPVIPFYECPNMPNNNTATNANNDNLDCNVLLNEDGGGDDPLKHDYVDDDYDDYDDDENDHNNLLNHQEDDNDAEICCAEEAATASWLIPEANRNNLTNINGGNSEGEDKMVKDKLKFKAYMQSIDFLQDVENYVDLEYLGTTTTITTPTTPTAHMGADSMVPVHTPEVIEHSSTKVSVETARSLDVDAASKCNYVYRTTSLNHCVSSSSIDVGIVPDSNTTTDISTPYHDPRGVFEIPPRVVHPGGHVEVMGREARVLRYREKRKNRRFEKTIRYASRKAYAETRPRIKGRFAKRTEVEVEQIYSSSLLPDQGYGVVPSY

SEQ ID NO: 3093 - protein, 240 aa, Oryza sativa (japonica cultivar-group)
MDRYGEKQQQQQMFASYVDASLLAASGEVQGERPRARRRRRRGARCVGGGGGGGEVDGGDPKKRRLSDEQVEMLELSFREERKLETGRKVHLASELGLDPKQVAVWFQNRRARHKSKLLEEEFSKLKHAHDAAILHKCHLENEVLRLKERLVVAEEEVRRLRSAAGSHTASGEGGDIMGLGGSGACVAGSPSSSFWTGTCQPPSFGGGDPFGDDDLVYVPEYGGYADNSVVEWFSLYGLI

SEQ ID NO: 3094 - protein, 410 aa, Picea abies
MSMPKLCDVCQVSNSVLYCRAHTAQLCLVCDVKIHGGSKASLCHERVWVCEVCEQAPAVVTCKADAAALCVACDTDIHSANPLASRHERAPVIPFYECPNMPNNNTATNANNDNLDCNVLLNEDGGGDDPLKHDYVDDDYDDYDDDENDHNNLLNHQEEDNDAEICCAEEAATASWLIPEANRNNLTNINGGNSEGEDKMVKDKLKFKAYMQSIDFLQDVENYVDLEYLGTTTTITTPTTPTAHMGADSMVPVHTPEVIEHSSTKVSVETARSLDVDAASKCNYVYRTTSLNHCVSSSSIDVGIVPDSNTTTDISTPYHDPRGVFEIPPRVVHPGGHVEVMGREARVLRYREKRKNRRFEKTIRYASRKAYAETRPRIKGRFAKRTEVEVEQIYSSSLLPDQGYGVVPSY

SEQ ID NO: 3095 - protein, 66 aa, Oryza sativa (japonica cultivar-group)
KQKVALAKQPNLRPRQVEVWFQNRRARTKLKQTEVDCEYLKRCCETLTEENRRLHKELAELRALKT

SEQ ID NO: 3096 - protein, 214 aa, Brassica napus
  misc_feature (41)..(41): Xaa can be any naturally occurring amino acid
AVVAPSSQPSITLDFTKPTVFGSSSKSSEMDFAKENFSVSXNSSYMSSAITGDGSVSKGSSIFLASQPVNSSGKPPLAGHPYRRRCVEHEHSENFSGKISGSGHGKCHCKKSRKNKMKRTIRVPAISSKIADIPPDEYSWRKYGQKPIKGSPHPRGYYKCSTFKECPARKHVERALDDPSMLIVTYEWEHDHNPSAMQQNVSSSGVNDFVFNSA

SEQ ID NO: 3097 - protein, 410 aa, Picea abies
  misc_feature (151)..(152): Xaa can be any naturally occurring amino acid
MSMPKLCDVCQVSNSVLYCRAHTAQLCLVCDVKIHGGSKASLCHERVWVCEVCEQAPAVVTCKADAAALCVACDTDIHSANPLASRHERAPVIPFYECPNMPNNNTATNANNDNLDCNVLLNEDGGGDDPLKHDYVDDDYDDYDDDENDHXXLLNHQEEDNDAEICCAEEAATASWLIPEANRNNLTNINGGNSEGEDKMVKDKLKFKAYMQSIDFLQDVENYVDLEYLGTTTTITTPTTPTAHMGADSMVPVHTPEVIEHSSTKVSVETARSLDVDAASKCNYVYRTTSLNHCVSSSSIDVGIVPDSNTTTDISTPYHDPRGVFEIPPRVVHPGGHVEVMGREARVLRYREKRKNRRFEKTIRYASRKAYAETRPRIKGRFAKRTEVEVEQIYSSSLLPDQGYGVVPSY

SEQ ID NO: 3098 - protein, 236 aa, Arabidopsis thaliana
MPTLYKKAGCQFQLTTMNNQNVDDHNLLLISQLYPNVYTPLVPQQGGEAKPTRRRKRKSKSVVVAEEGENEGNGWFRKRKLSDEQVRMLEISFEDDHKLESERKDRLASELGLDPRQVAVWFQNRRARWKNKRVEDEYTKLKNAYETTVVEKCRLDSEVIHLKEQLYEAEREIQRLAKRVEGTLSNSPISSSVTIEANHTTPFFGDYDIGFDGEADENLLYSPDYIDGLDWMSQFM

SEQ ID NO: 3099 - protein, 199 aa, Dicentra eximia
AGIMKKARELTVLCDAEVSLIMFSSTGKFSEYISPSATTKRMFDRYQQVSGVNLWNSHYERMQDNLNKQKEINNKLRREIRQRMGEDLNDLSIEELRGLEQNMDNSLKIVRDRKYHVITTQTETYRKKLRNLHETHNNLLREFEGRDEDTHYALANEGDYETALEMANGGQNIFAFRLQPSQPNLHDGGGYGSHDLRLA

SEQ ID NO: 3100 - protein, 195 aa, Ranunculus bulbosus
AGIIKKAQELTVLCDAEVSLIMVSSSGKCVDFISPTISQKEFYDKYQKITKQDLWKSQYDEMQERFKHLMETNRKLRREIGQRVGEDLEGLGIHELRSLEQDLRNSAKVVRLRKFGLLSSQGETQKKKIKNLAGINGSLWQEYQERVEEEYIASGMSELELGNAVAPQVFSFRLQPSQPNLHDDEEYEIHDLRLV

SEQ ID NO: 3101 - protein, 183 aa, Acacia mangium
VLCDAEVALIIFSPRGKLYEFASSSMREAIERYRSHNRDVQTATRFVEQNMQYLKQETETMMKKIGQLGILKRKLLGEDCGSCSVKELEEIEQQLESSVRKVRERKSQVYNEQMEQLKEKRKTLAAENARLSEKYNSLAKQAREKNDGENAASLENIPTSEVETDLLIGLPETRSITLPIHVL

SEQ ID NO: 3102 - protein, 235 aa, Tradescantia virginiana
VQLKRMENKINRQVTFSKRRTGLLKKAHEISVLCDAEVGLIIFSTKGKLYEYSTDNSMAKILERYDRYATAERAVLEANLNLEVGSHYEYRKIKAKVDALQKSQRHLMGEQLDTMTNKELQQLEQQLETALKHIRSRKNQMMLESVAALQKKEKALREQKSILEKKLIEKQKDMEISQIHQYQAHEDNTSPTSLVLTNSLPTTLNTNGCITHAIEEEHAPTLPHTNNNNLPPWMV

SEQ ID NO: 3103 - protein, 189 aa, Michelia figo
GGIMKKAKELTVLCDAQVSLIMFSSTGKFSEYCSPSTTTKNIFDRYQQASGTSLWNSHYERMQGHLIKLKEENNNLRREIRQRIGEDLDDLEIEELRGLEQNLESSIKVVRERKYHVIQTQTETYKKKLRSLNDEQAKLIRVLEGQAENGAYGLVDNGGPDYESALVLANGGAHILHDTGFGIHDLRLA

SEQ ID NO: 3104 - protein, 352 aa, Ischaemum afrum
PSVKHMFPFCDSSSPMDLPLYQQLQLSPPSPKPDQSSSIYCYPCSPSFAAADASFHMSYQIGSAAAATPPQAVINSSELPVQPLMEQALAPGMELGACASGAQRAGAGVSLDRAAAAARKDRHSKIRTAGGMRDRRMRLSLDVARDFFAVQDLLGFDKPSKTVRWLLNVCKAAIQEMVGDDVDASSECVEEGSSSLSVGGKHNPSEQLGGGDQKTKGNGRSEGKKPAKARKAATTTPKPPRKSANNAHPVPDKETRAKARERARERTKEKHRMRWVKLASAIDVEAAAASVASDRPSSNHLNHHSSSSMNMPRAAAAELEERERCSSALNNRGRMQEITGASDMVLGFGNGG

SEQ ID NO: 3105 - protein, 224 aa, Arabidopsis thaliana
KLVIQLHAILGNRWAAIAAQLPGRTDNEIKNLWNTHLKKRLYSMGLDPRTHEPLPSYGLAKQAPSSPTTRHMAQWESARVEAEARLSRESMLFSPSFYSGVVKTECDHFLRIWNSEIGEAFRNLAPLDESTITSQSPCSRATSTSSALLKSSTNSWGGKEVTVAIHGSDYSPYSNDLEDDSTDSALQLLLDFPISDDDMSFLEENIDSYSQAPPIGLVSMVSKF

SEQ ID NO: 3106 - protein, 210 aa, Oryza sativa (japonica cultivar-group)
MKIGCDACEQAEAAVLCCADEAALCRRCDAAVHSANRLAGKHTRVALLLPSSSSAAAGDDDHHPTCDICQEKTGYFFCLEDRALLCRSCDVAVHTATAHAAAHRRFLITGVRIGGSVDAAAAADVIVSPTSSSIAPAGSASSNHAGAAGNNNGRSPAPVRFSGGDGGVEPEQQWPWSDVFAADDDDDVSAAMEQCYYHGISEPHSSSLTG

SEQ ID NO: 3107 - protein, 226 aa, Paeonia suffruticosa
SQVTFSKRRGGLLKKAHEISVLCDAEVALIVFSTKGKLFEYSTDSSMEKILDRYEQYSIAERQLVEEPGSQGNWSLEYSKLRAKIELLQRNQRRFMGEDLDSLSPKDLQNMEQQLDVSLKNIRSRKNQLMYESISELQKKERAIQEQNNLLAKQIKEKEKTMAQQAQWEQQIHHGPNASAYLLSPHELTTLNMGGNYQGEPTEMRRNELDLTLEPIYTCHLGCFGA

SEQ ID NO: 3108 - protein, 232 aa, Arabidopsis thaliana
RLRWINYLRPGLKRDMISAEEEETILTFHSPLGNKWSQIAKFLPGRTDNEIKNYWHSHLKKKWLKSQSLQDAKSISPPSSSSSSLVACGERNPETLISNHVFSLQRLLENKSSSPSQESNGNNSHQCSSAPEIPRLFFSEWLSSSYPHTDYSSEFTDSKHSQAPNVEETLSAYEEMGDVDQFHYNEMMINNSNWTLNDIVFGSKCKKQEHHIYREASDCNSSAEFFSPPTTT

SEQ ID NO: 3109 - protein, 242 aa, Daucus carota subsp. sativus
MGRGKVQLKRIENKINRQVTFSKRRGGLLKKAHEISVLCDAEVALIVFSNKGKLFEYSTDSSMEEILERYERYSYAERQVIANDPESTGNWTLEYTKLKARIDLLQRDHRHYMGEDLDSLTLKEIQNLEQQLDTALKHIRSRKNQLIFESISDLQKKEKAIQEENGKLTKKIKEREKTMVQQAQWEKQNPSPNLSTFLMPQENPFLNIGGTFQGESSQGMTRNDLDLTLEPNHYPCNLRCFA

SEQ ID NO: 3110 - protein, 141 aa, Arabidopsis thaliana
MPTLYKKAGCQFQLTTMEEGDFFNCCFSEISSGMTMNKKKMKKSNNQKRFSEEQIKSLELIFESETRLEPRKKVQVARELGLQPRQVAIWFQNKRARWKTKQLEKEYNTLRANYNNLASQFEIMKKEKQSLVSELQRLNEE

SEQ ID NO: 3111 - protein, 266 aa, Brassica rapa
MADRVKGPWSQEEDEQLRLMVEKYGPRNWSAISKSIPGRSGKSCRLRWCNQLSPEVEHRPFSPEEDETIVSARAKFGNKWATIARLLNGRTDNAVKNHWNSTLKRKCSDGNPTAEEEQDPAKKRRSMSSESVPPVDTGLYMSPESPADVGSDSSAVPPQLFKPMTSSAEEDPATTLSLSLSVPVSQESRNTGSSDNSLPFPRFERQMKINVEERGGEARRAEFMTVVHEMVKAEVRSYMAEMQRNNAGGFVVGGFYDSGGITPKVE

SEQ ID NO: 3112 - protein, 215 aa, Arabidopsis thaliana
RLRWINYLRPGLKRGPFSEEEEETILTLHSSLGNKWSRIAKYLPGRTDNEIKNYWHSYLKKRWLKSQPQLKSQISDLTESPSSLLSCGKRNLETETLDHVISFQKFSENPTSSPSKESNNNMIMNNSNNLPKLFFSEWISSSNPHIDYSSAFTDSKHINETQDQINEEEVMMINNNNYSSLEDVMLRTDFLQPDHEYANYYSSGDFFINSDQNYV

SEQ ID NO: 3113 - protein, 266 aa, Triticum aestivum
MTFSVSAAMEGGHGHEYMIRFDGHLEDPSPSTATAEPPPPPPPFAGRAISPEQEHGAMVAALLHVISGYTTPPPDFFPAAAGKEVCPVCRVDGCLGCEFFGAAEATGATAAALDAPKAAVTAGGPQRRRRNKKNKYRGVRQRPWGKWAAEIRDPRRAVRVWLGTFDTAEDAARAYDRAAVEFRGPRAKLNFPFPEQQQLGDGNAAPAKSGTCSPSPSSAEVEVRVPQTWQQNGGQETGDQLWDGLQDLMKLDESELWFPPSANSWD

SEQ ID NO: 3114 - protein, 258 aa, Oryza sativa
PQWGAQETRELIAARGEMERESAAAAAARRSAKTLWEAVSARLRERGYRRTAEQCKCKWKNLFFRYKGKETSDPENGRQCPFFDELHAVFTERARTMQQQLLESESGPSVKKKLKRPSGDLSSEDSDDEEDGSGDSGDEKPIRSRKRKIADKRQQSQRMAEKSRTSISSIHELLQDFLVQQQRMDIQWHEMMERRSQERIVFEQEWRQSMQKLEQERLMLEHTWMEREEQRRMREEARAEKRDALLTTLLNKVLQEDL

SEQ ID NO: 3115 - protein, 223 aa, Daucus carota subsp. sativus
MARGKIQIKKIENATNRQVTYSKRRNGLFKKAHELSVLCDAKVSIIMVSSTNKLHEFITPNLSQKQLYDQYQKAKPCDLWSNHYQAMQEQLRKLREVNRNLRNEISHRKGESLNGVSHEELYILEQKMQEAVDITRAQKMKTITNQIEKSKKKVRNGEQVQRTLLQDLELFKEEDPHYGLVDNGGDYETVFGCSNAYPGLLALRLQSNHYNFHGGAGSDLTFA

SEQ ID NO: 3116 - protein, 245 aa, Brassica napus
MGRGRVELKRIENTINRQVTFAKRRGGVLKKAYELSVLCDAEVALIIFSNRGKLFEFCSNSSMLKTLERYQKCNYGPPEPNVPSREALAVELSSQQEYLKLKQRYDALQRTQRNLLGEDLGPLSTKELESLERQLDSSLKQIRGLRTQFMLDQLNDLQSKERMLSDTNKTLRLRLADGYQMPFQLNPNQEEVHVDYGHHQPQPQAFFQPLEYEPIFQIGYHQGQQQDHGMGAGPSANNYMLGWLP

SEQ ID NO: 3117 - protein, 255 aa, Daucus carota subsp. sativus
MSFVDDQSGDLSLHERKSGRGKIEIKRIENTTNRQVTFCKRRNGLLKKAYELSVLCDAEVALIVFSNRGRLYEYANNSVRGTIERYKKANSDTPNTATVSEANTQYYQKEAARLRQQISNLQNSNRHLMGEALGAVPAKELKGLETKLQNGLSRVRSKKNELLFAEIEFMRKREIDLHNNNQYLRAKISENERAQQQMSLMPGASGSSEQYRDVGQPHESFDARNYLQVNGLQPNNANYSSHQDHQTQHVPLQLV

SEQ ID NO: 3118 - protein, 890 aa, Triticum monococcum
MGSSTSKASDSSSHRDGPKRPDQGLSVGTSSLMALHGKLTQLERQIQQARLASIKEKLEANRRALRKHTCGLFDVAALAEAASRGSESSNVLSQLAAEGQSRIVGWNLARGSGEREVVHVQEESLSADGTLVLSSSGDSAQSIVLQLVKLPLVDKIPPYTTWIFLDKNQRMADDRSIAGRRRIYYDSAGNEALICSESDEEIPQPEEEKHVFTEGEDQLIWKATQERGLSQEDLNVICQFIDASPSEIEGRSEFLFEKHEKHSEFSDKIESQLPLDKTVDIVLDSFDNLFCRRCLGFDCRLHGCSQNLVFPSEKQPCGFELDGNKSPCGDQCYLRRREGFQDIRKHDYASSATHNMESRSTLHKVGTDMVSESEDSNREEEIIKSSISVGTSRSKISFESAEKHTTLPSGDASETENVSTDMLLRSLGKRKVSKGPRSSDDFPYKKPRMLASDIPFASHILNNHSTSEIGDTRPDIREFGGNQRDDPNKKTSNKDSCGGSPTSTAEDAARNTNKESSANNLFSSSREHPLSHWSTLERDLYLKGIEIFGKNSCLIVRNLLCGLKTCMEVASYMYNNGAANVSKSISGDFTETEQNYMEQGMVVRTKVCRRRGRTRKHKYPSKAAGHPAIRKKVGDGKQCDRQYTPCGCQEMCNKNCPCVENGTCCEKYCGCSKSCKNRFRGCHCAKSQCRSRQCPCFAASRECDPDVCRNCWVSCGDGSLGEPPERGDGYQCGNMKLLLKQQQRILLGKSDVAGWGAFIKNPVHKNDYLGEYTGELISHKEADKRGKIYDRANSSFLFDLNDQFVLDAYRKGDKLKFANHSSSPNCYAKVMMVAGDHRVGIYAREHIEASAELFYDYRYGPDQAPAWARRPEGAKKDEASGSHRRAHKVA

SEQ ID NO: 3119 - protein, 152 aa, Oryza sativa
  misc_feature (41)..(41): Xaa can be any naturally occurring amino acid
  misc_feature (128)..(128): Xaa can be any naturally occurring amino acid
ARGADDEDNGGGGARKKLRLSKEQSSFLEDSFKEHSTLTPXKLKQTEVDCEHLKRCCERLTRENRRLQREVAELRGTLRTTTSSYPPLYGLHHLPAAAGTVFRVCPSCEHSKVVAAAASESFSPRVFXGAGAPAAITAAAAVPSPGAGSPPS

SEQ ID NO: 3120 - protein, 221 aa, Nicotiana tabacum
MNQSAFASFRNQSIEGFGVSGYGNVSANHRNMNKRMMEFLKKSWIPKIGEVKMEREKVHKHMIKERIRREKQKQSYLDLHKLLPMGTKGEKNAIVQTAASRIQELQKYKESLKKRNDELQMILAESKKEEFEKAKIKVKINYPIYGIDSMLEVLKCLKNCGTKANAIQSSFSQQEFSSILEIETKIGAAEVEKAVQNTLFETERNFRAHQLPMTWLTSATE

SEQ ID NO: 3121 - protein, 335 aa, Brassica oleracea var. alboglabra
MLKQESNWAQTCDTCRSAACTVYCRADSAYLCTNCDAQVHAANRLASRHERVRVCQSCERAPAAFFCKADAASLCTACDSQIHSANPLARRHQRVPILPISGSMVTNHSSETTETEDIVVVGQEEEDEAEAASWLLPSSLKNSGDNNNNNNNNNSENRFSVGDEYVDLVDYNKYQQDYNVPQRSYVADGVVPLQVGVLKSHMHHEEHNFQFGFTNVSSEASPIHMVSLVPESTLSETTVSHPRSPKVATEELHDAPVQMLSPVERKARVMRYREKKKKRKFEKRIRYASRKEYAEKRPRIKGRFAKRNEVDAEEADKAFSSMVMFDTGYGIVPSF

SEQ ID NO: 3122 - protein, 357 aa, Antirrhinum majus
MKERQRWRPEEDALLRAYVKEYGPRDWHLVTQRMNKPLNRDAKSCLERWKNYLKPGIKKESLTQEEQILVINLQAKHGNKWKKIAAEVPGRTAKRLGKWWEVFKEKKQREEKDNKKITEPIEEGKYDRILETFAEKIVKERVVSRIITMPPTSNSGFLQNDPSPHSAQSVLPPWLASSSMTTTIRPQSPSVTLSLSPSVVPPAPAIPWLHPDNTTHGPSNLSSLGVVAPFMGENHIVPELLECCRELEEGQRAWAAHRKEAAWRLKRVELQLESEKACRRREKMEEIEAKMKALREEQKASLDRIEAEYREQLAGLRREAEVKEQKLAEQWAAKHLRLTKFLEQTGYRSIAGELNGR

SEQ ID NO: 3123 - protein, 279 aa, Glycine max
MENRTSSVLPPGFRFHPTDEELIVYYLCNQASSRPCPASIIPEVDIYKFDPWELPDKTDFGEKEWYFFSPRERKYPNGVRPNRATVSGYWKATGTDKAIYSGSKHVGVKKALVFYKGKPPKGLKTDWIMHEYRLIGSRRQANRQVGSMRLDDWVLCRIYKKKNIGKSMEAKEDYPIAQINLTPANNNSEQELVKFPRTSSLTHLLEMDYLGPISHILPDASYNSTFDFQINTANGGIDPFVKPQLVEIPYATDSGKYQVKQNSTINPTIFVNQVYDQRG

SEQ ID NO: 3124 - protein, 230 aa, Spinacia oleracea
GRGKIEIKRIENTTNRQVTFCKRRNGLLKKAYELSVLCDAEIALIVFSSRGRLYEYANQSVKGTIDRYKKACSDQTGAGSVAEANAQYYQQEAAKLRNQIRTATENNRLLSRHMMGEGLSSLSMKELKNLETKLEKGISRIRSKKNELLFAEIEFMQKREIELHNNNQFLRARISENERAQQSMSLMPPGGSDYDLVPSQSFDSRNYFQVNALQPNSQYARQDQTPLQLV

SEQ ID NO: 3125 - protein, 317 aa, Zea mays
MWLVIRFVASSLLELCSGMLLYQLYVFLLTSFAFSVFCSTVITELKQFLRGSIAIAMEAGRMDQPFMAAINSQPFVEDIEPVKKASGDMPATTGSGCFECNICLDFASEPVVTFCGHLYCWPCIYEWLRPGVESAASDNSSSARRQCPVCKATLSTDTLVPLYGRGGNSKKSLDGMAIPRRPMVHRETVEEQQNAQSNVNDQHYHQSMEDNSQRQPLLQAHHHPIPTGFDFIYPPAPVGRGLIHSTAGGVLGGMAEIVLPLALRGQMPASLYYTNPYHAATQNVNPRLRRHQMEIERSLHQIWFFLCVFVVLCLLLF

SEQ ID NO: 3126 - protein, 156 aa, Kluyveromyces lactis NRRL Y-1140
MDQPAANNQENVTNEQGPLMDLEEDEEIDVFHNVGQGLAGRYREIMIQYWQELINEIESTNEPGSQFQDDFKSHSLPLARIKKVMKTDEEVRMISGEAPILFAKACEIFITELTMRAWCVAEENKRRTLQKQDIADALQKSDMFDFLIDIVPRNVQ

SEQ ID NO: 3127 - protein, 299 aa, Glycine max
MASELELPPGFRFHPTDEELVLHYLCRKCASQPIAVPIIAEIDLYKYDPWDLPGLATYGEKEWYFFSPRDRKYPNGSRPNRAAGTGYWKATGADKPIGQPKPVGIKKALVFYAGKAPKGDKSNWIMHEYRLADVDRSVRKKNTLRLDDWVLCRIYNKKGTIEKLQPSSDVAHSRNIESSEIEDRKPEILKSGGGCLPPPAPVPAPPQATAKTDYMYFDPSDSIPKLHTDSSCSEQVVSPGFASEVQSEPKWNEWEKSLEFPFNYVDATLNNSFMAQFQGNNQMLSPLQDMFMYWPNKSF

SEQ ID NO: 3128 - protein, 189 aa, Liriodendron tulipifera
GGIMKKAKELTVLCDAEVSLIMFSSTGKFSEYCSPSTTTKKIFDRYQQVSGSSLWNSHYEKMQSHLNKLKEDNNSLRRAIRHRIGEDLDDLEIEELRGLEQNLESSIKVVRERKYHVINTQTETYKKKLRNLHEAHANLIRELEGQAENGGYGLVDNGGPDYESALVLANGGAHRLHNTGFGIHDLRLA

SEQ ID NO: 3129 - protein, 216 aa, Peperomia hirta
IENDTNRQVTFSKRRNGLFKKAQELTVLCDAQISIILISSTNRLYDYCSPSTSHKKVYDQYQDGRKVDLWKKRYENMKHQLNEQSERSNKLKKEIRQFMGEELDGLSFEQLHGLEQKVERASNIVRERKEKAISTKVDTLNKKVKGYEKQHEGYRQKLEMMEVDYGGTQYKGIPMCGPHFLGYNMQGNPYHESAHSDVTTANNISSAYGIYDLRLA

SEQ ID NO: 3130 - protein, 234 aa, Triticum aestivum
MRSLSLDAAFFDGLALQGGGGGGAGHKRSGSMDGASSPSDGESALSGGLPDYAKKAIPAERLAELALLDPKRAKRILANRQSAPRSKERKIKYTGELERKVQTLQTEATTLSAQLTLLQRDTSGLTVENRELKLRLQSMEEQAKLRDALNDALREEVQRLKIAAGQVPNMNGNPFGGGLQQHQQQQQQIPNYFSQQQMHYQGHQHHHPQNHSQNSSNGGQSLSGQSLSDSMDFM

SEQ ID NO: 3131 - protein, 205 aa, Zea mays
IRLEEDGAATRKKLRLKRERDLSCEEVVDAKEIDQRDLSCEGIIRATEEEEDGAATRKKLRLTKEQSALLEESFKQHSTLNPKQKQALSKQLNLRPRQVEVWFQNRRARTKLKQTEVDCEFLKKCCETLTDENRRLQKELQELKALKLAQPLYMPMPAATLAMCPSCERLGGSAVNGAGGSPKTSFSMAPKPHFFNPFANPSAAC

SEQ ID NO: 3132 - protein, 356 aa, Zea mays
MAPLSPTPASASAPVSSSPRSLVPDASAAPMRPASPPQELPAAGGEIQAALAPANASTAGARGGGGSFTALLGLPTSQAMELLLPRTTPPALATAPAPTFPSDPHLVDRAARLSTFAPPSPSPSSTSPARPLPAAANAGKRKADPVDRASKGKAAKKGKTAEEKLAGGDGDDEKPAYVHVRARRGQATDSHSLAERARREKINARMELLKELVPGCSKVSGTALVLDEIINHVQSLQRQVEYLSMRLAAVNPRVDFGGLDSFLTTECGRIAGFNCKNGIDLEQVTWPEMGVHGARQLMQLQQQFWHGDLTHPHQVASQWEKRGDGHPPVFSNSSPSLFGYDLTSSGKLRTQSDTPS

SEQ ID NO: 3133 - protein, 247 aa, Nicotiana tabacum
MEEFFQIQSSQTNNGEVLWFENEAFLMNQSAFASFRNQSIEGFGVSGYGNVSANHRNMNKRMMEFLKKSWIPKIGEVKMEREKVHKHMIKERIRREKQKQSYLDLHKLLPMGTKGEKNAIVQTAASRIQELQKYKESLKKRNDELQMILAESKKEEFEKAKIKVKINYPIYGIDSMLEVLKCLKNCGTKANAIQSSFSQQEFSSILEIETKIGAAEVEKAVQNTLFETERNFRAHQLPMTWLTSATE

SEQ ID NO: 3134 - protein, 325 aa, Triticum aestivum
  misc_feature (211)..(211): Xaa can be any naturally occurring amino acid
MHHAAAAGLDLGLGLGLGLASQGSLTSSTTTSSSSPASHWTAALSSVVGPQESYGLHQYAGHNQPRKEEPGMRTSTSPESGVSAGTKRGLERTGSGVSRAAGSDEDDDGGDGAGGRKKLRLSKDQAAVLEECFKTHSTLNPKQKTALANRLGLRPRQVEVWFQNRRARTKLKQTEVDCEYMKRWCEQLAEQNKRLEKEVAELRALKAAPAXTPSRAAPPASSPCAPSCRRVGRHHRRNGRQPQQHHDPQRATPRPPGQSGGKVLTRHCKFFRSTKTGTCRNGRKGGGPLEGRGLSLSRGVRVGYETPRERRAGEAPAPLGGVGRR

SEQ ID NO: 3135 - protein, 220 aa, Pinus radiata
MGRGKIEIKMIENATNRQVTFSKRRGGLKKKAQELSVLCNAEVALIIFSSTGKLHEWSSSSSFFMLQKSMKKILERYQKSEQGLGLMDYQHQQLLCEMRRITKENESLQERLRHMNGEEVNSLKLPELFKLEEQLDKAATQVRRRKDHVLENERIKQRNKMRRMEEENIILHGMNQGHMEEDNGQFNFVLYQPVKKMRTAFPAPLLRLQPNQPNLQDIGY

SEQ ID NO: 3136 - protein, 313 aa, Gossypium arboreum
MEPAWVDTTLDLNINPCFRTNKAMKREFEGDVAESAPVKYESGVLVEELNRVSAENKKLTEMLTVLCEQYYSLQHQFMELVNKNPEIETTAAATTSSSKKRKAEWEDYGANMIGFSGNTETSSSDDGSPKTPKDCIKPKVSRVQVRTNPSDNSLIVRDGYQWRKYGQKVTRDNPCPRAYFKCSFAPSCPVKKKVQRSAEDPSILVATYEGEHNHHEHHRSPPAEISLNSNNNTPSSNTGSGPVSSAPTKALASTVTLELLQPAGLGGDETERAALQIDAPAIQQILVHQMAASLSRDPNFTAALAAAISGRAV

SEQ ID NO: 3137 - protein, 339 aa, Zea mays
MSSGGGGRVPAAAAAQSQELQLPPGFRFHPTDEELVVHYLCRRCAGLPISVPIIAEVDLYKHDPWQLPRMALYGEKEWYFFSPRDRKYPNGSRPNRAAGAGYWKATGADKPVGTPKPVAIKKALVFYAGKAPKGDKTNWIMHEYRLADVDRTARKKNNSLRLDDWVLCRIYNKKGALEKPTGAGGRAEASSQGALGSMSMGSPPEQKPSVLPSATATAAAAAGTGYAPLPFSELAAYYEVRPSDSMPRAHGADSSCSGHALAATSSCGGGGGERPEVQSQPKISEWERTFAAGAGPGINPAGSMLGLGGHQLGPSAVGVGLPAGDPLLQDILTYWGKPY

SEQ ID NO: 3138 - protein, 273 aa, Arabidopsis thaliana
MEGIQHPIPRTVEEVFSDFRGRRAGLIKALSTGQLDLSFSIYSVSFDRILDDFYVQKFYHQCDPEKENLCLYGLPNETWEVNLPVEEVPPELPEPALGINFARDGMQEKDWISLVAVHSDSWLISVAFYFGARFGFGKNERKRLFQMINDLPTIFEVVTGNAKQSKDQSANHNSSRSKSSGGKPRHSESHTKASKMSPPPRKEDESGDEDEDDEQGAVCGACGDNYGGDEFWICCDACEKWFHGKCVKITPAKAEHIKHYKCPSCTTSKKMKA

SEQ ID NO: 3139 - protein, 247 aa, Oryza sativa (japonica cultivar-group)
IPSSSLLQPQSPFFFFFLYLLFLLLFQCCSSSSSSGGARRRARERESEESLGEMGECRGGGGGGDGLIKLFGKTIPVQPDAKDVQQHSGSSSSSTESDVQETAAVAVADPSPRSEVVDGESPPQPGGEAASHQQQQKEMKLKKPDKILPCPRCSSMDTKFCYFNNYNVNQPRHFCKHCQRYWTAGGAMRNVPVGAGVLGLHDSTSWSLEPPMAGHSPVSGHLIIITTYKCYTFSLLLHTRQASQRGW

SEQ ID NO: 3140 - protein, 231 aa, Nicotiana benthamiana
MAPKEKGTAAGKVNGVSKEVHYRGVRKRPWGRYAAEIRDPGKKSRVWLGTFDTAEDAARAYDAAAREFRGTKAKTNFLVLEQENVKLANGNRSPSYSSTVENSPPVMPENSPPAVILDTSPLDLSLGGSGSLFSNGVGRFHMYYLEAVQREQVISSYKKSCRTTAEFIAGCGGGASGESDCRTTAEFIAGCGGGASGESDSSSVIDFMGHDLKPTTRPINLDLNLPPPENM

SEQ ID NO: 3141 - protein, 315 aa, Arabidopsis thaliana
MSERDDGLGLSLSLSLGFNQKDPSSRLNPMPLASYASSSHMQHMQQSNYNHPQKIQNTWINMFQSSERNSDMRSFLRGIDVNRAPSTVVVDVEDEGAGVSSPNSTVSSVMSGKKSERELMAAAGAVGGGRVEDNEIERASCSLGGGSDDEDGSGNGDDSSRKKLRLSKEQALVLEETFKEHSTLNPKQKMALAKQLNLRTRQVEVWFQNRRARTKLKQTEVDCEYLKRCCENLTDENRRLQKEVSELRALKLSPHLYMHMKPPTTLTMCPSCERVAVTSSSSSVAPPVMNSSSPMGPMSPWAAMPLRQRPAAGSH

SEQ ID NO: 3142 - protein, 174 aa, Dendrobium grex Madame Thong-In
MGRGRVEMKRIENKINRQVTFAKRRTGLLKKAYELSVLCDVEVALIIFSNRGKLYEFCSSRSMLKTLEKYQKCSDGAPEMTMTSRETQSSQVEYLKLKSQVEALQRSQRNLLGEDLNPLGGKDLDQLERQLEASLKQIISTRMQYMLDQLGDLQQRELLLFETNKSLGTRVSAL

SEQ ID NO: 3143 - protein, 334 aa, Coccidioides immitis RS
MDAAQISWEIENCVNLVDPYRDALYTYDPAASQALMSAKPWSRDPHYFKSIRISAVALLKMVMHARSGGSLEVMGLMQGYVSANTFIVTDAFRLPVEGTETRVNAQDEANEYMVSYLQACRDSGRMENAIGWYHSHPGYGCWLSGIDVSTQDTQQTYNDPFVAVVIDPDRTISAGKVEIGAFRTYPKDYQPSRAEHDDDGYQSIPLHKVEDFGAHASQYYSLEVSHFKSTLDTKILSLLWNKYWVATISQSPLFTNRDYITKQMADMSEKIKKATRAVESNAQRENTLVTNDQQLEKVAKAGKRIVGEELNGLMAAEIKRELFQGVGPQTAGKT

SEQ ID NO: 3144 - protein, 247 aa, Dendrobium grex Madame Thong-In
MGRGRVQLKRIENKINRQVTFSKRRSGLLKKAHEISVLCDAEVALIVFSNKGKLYEYSTDSSMEKILERYERYSYAERALFSNEANPQADWRLEYNKLKARVESLQKSQRHLMGEQLDSLSIKELQRLEQQLESSLKFIRSRKTQLILHSISELQKMEKILLEQNKTLEKEIIAKEKAKALVQHAPWEKQNQSQYSSALPPVISDSVPTPTSRTFQARANEEESPQPQLRVSNTLLPPWMLSHMNGQ

SEQ ID NO: 3145 - protein, 1468 aa, Ustilago maydis 521
MPYSSQQNGYTSASTSRLSEQTSSHSRSSREDRHLTEKGRRPPSPEARHRSDRDYDRRRSTEYVRDDDYRRSSRSSHDSRYADAYDHWRSARSAYSPTPRDDRRDEARNDLSSTKRHRSPEHSTSRLRHRSPESAHRRQNGTANRLDSKPDRGGDRKTGEALDSGRSRWSQRAYEYDDWRNERPSARYERYRHDREPHRSRREDEYETKRSRDDSNGNSIYAPTRRSRSRSRSRSRSRDRYRSRDHSRERRRERSRDRSNGTYSSRDDRRPKADRSAHTIKRDEHSTRLNGTSEDSKDLRHESQRRVSASVQSASEGPASTPVARAVYIKHAEVDQEAPAPPTTRDYHSCPQRWPDQADSAVRASSAPNGSATAPSRSDRPPANGSSGRHSPRSLPTREKAEEARTSSTRRPSSQTNDNVNNSRDPLTQRKATSERSFGHVLLPHELPVECRGKNYMATATYKEGVKSIYKSAADKHLVDVDTRDPRRLGKKSSRYRESLHSASFRWDSNSRGKKPLPPPRNLVLTNLSGLLQPHQILLHILPHGRIESSKLEIDPKIGQSLGIFRVTFAHDFDEHGKPLESMPAGQNPQHGAKVAKAACLALNGRMIGQTRAQAFLDRDGEVIAERIKAKLAENEHKLRPTIVPPAPPAAASSSPATPSTTKQSMPPPQVPRGPKVFMPAAPSPSYASSPASARANTDRYEYSATSHSRYRSSYEESRKLASSETYHRRRGTEEYDTYNRSKPYADAQVPAGSRSETRKDIKRPDEEILNELRDKKRPYVHIPRPKNCDIDVTSVEAQLRSTAPIWVREGQKGFYAAFHTSKEANQCKVVNETLTIGGYTLQVDVRSAPSQHAPSQQIRTPSGKHASVPLSMPAPPKQERKAIDTGLRPPTADEKLKVDWSAAELQDAVFRMLQKELADTFVRDVKSRVVGPYLTAYLKPDGEGGKMLAKATMKKPVIPTSINDHGTTLFEATGEARLPSFRKLAGAHPKKKASDADTTTSQAKRDQTDAKKKRGHTHRSKVHRDRDVSSSENESDDMERGMVVAARRNSYTRSKSSTKRRGAAAWLLEASDAEAGTDDVDSTETDALSRSVSASVEPTGEEQIEVDVGAKAKKIPKVKAATVSKKKGTTAARKKLDVAPPEAVVEADQGSETATPETDVPIKTAAAKAKVKPAKTSAKAKSALVDPFEAGLVEDSEDCHYLRLALEHLSRTGELASEHTLPDEIELEVEAEEQAMAAGGIPKHSTGSARTEGYYRIPPEQKAMHLPDRNKATEDVDTSSNAQILQSARNNRADSRRLVLGIEQHKRETATDTDIFKFNQLRTRKKQLKFAKSPIHDWGLYAMELIPAGDMVIEYVGEVVRQQVADEREKQYERQGNFSTYLFRVDDDLVVDATHKGNIARLMNHCCTPNCNAKILTLNGEKRIVLFAKTAIRAGEELTYDYKFQSSADDEDAIPCLCGSPGCRRFL

SEQ ID NO: 3146 - protein, 189 aa, Pisum sativum
MEFKATELRLGLPGITEEEEKKIIHGSSVVKNNNKRQLPQTSEESVSISKVTNDEHIVESSSAAPPAKAKIVGWPPIRSYRKNSLHEADVGGIFVKVSMDGAPYLRKIDLRVYGGYSELLKALETMFKLTIGEYSEREGYKGSEYAPTYEDKDGDWMLVGDVPWDMFVTSCKRLRIMKGTEAKGLGCGV

SEQ ID NO: 3147 - protein, 630 aa, Cryptococcus neoformans var. neoformans B-3501A
MTVTQRKPRVDNAQNDSRPIIEPGIKYTCDFCHVDITHTVRIKCAMKQCEEVDLCPTCFCEGKEGLQHKAWHDYMVVEQNSQPIFTPDWGADEELLLISGLIQNGLGNWAEVAQHVGTRTKEECEQHYLQVYLGVGEHGEDLRVKEKEADEKVDESKRRRREFMPPMDRSFPYDPDEFQQRKKARIEELRKPQALPPSNAAPPVSAPTNHEIGGFMPARLEFEHEVDNDAEMAVKDMEFGLVMQYGGDEQPQAKITRPPDEEEEEDEEGGGEDEKGVEKKGKVKKEKQKEDEKEDKPVSPAIEDPDELEVKLAMMDIYFSKLDKREDAKEIIFDRGLTEYRAIQAQDKKLTKEERELVQRYKPFAKLQTAEDFEVLVEGLIYEQTLRRRIAELQEYRRMGITTAAEADVYDNVKNTRSMEFPTQKPAEVLPSGARINAGQHRFLHGTMATSLPDAKTREPTPRAIPAVGRKPPQPLNLANSASLDLLSSEEQSLCSTLRVLPKPYLTIKELYIRENERRQGLLRRRDARKMLNIDVNKSGRIFDFLVQSGMLVLAYEPQGKGKASLQAAAAAVAHGAANGMTTMDGQSQGKDMLMERKKQGVQNDIFIEARQKYQNKQLALWFLGCKKYA

SEQ ID NO: 3148 - protein, 220 aa, Dendrobium grex Madame Thong-In
MGRGRVELKRIENKINRQVTFAKRRNGLLKKAYELSVLCDAEVALIVFSNRGRLFEFCSSTSMTKTLERYQKCSYNASESAVPSKDAQNSYHEYLTLKAKVEYLQRSQGNLLGEDLIELSSKELDQLELQLEMSLKQIRSTKTQLMLDQLCDIKRKEQMLHEANRALSMKLKEDGPEIPLELSWPGGETNGSSERQQPQSDKFFQPLPCSNPSLQIGYSP

SEQ ID NO: 3149 - protein, 274 aa, Brassica napus
MMMRKEDLGLSLSLGLSQDHTPLQSQNPNSSISNNLHRFPWNQTFASTSDLGKIDVNSLPRTVDCEEEPGVSSPNSTISSTISGGKRSEREGISEHDEITPDRGYSRGNSDEEEDGGETSRKKLRLSKDQSAFLEETFKEHNTLNPKQKLALAKKLSLTARQVEVWFRSGRARTKLKQTEVDCEYLKRCVEKLTEENRRLQKEAMELRTLKLSPQFYGQMTPPTTLIMCPSCERVAGPASNHQHNHRPVPVNPWVACAGQVTHGLNFEALRPRS

SEQ ID NO: 3150 - protein, 410 aa, Picea abies
  misc_feature (293)..(293): Xaa can be any naturally occurring amino acid
MSMPKLCDVCQVSNSVLYCRAHTAQLCLVCDVKIHGGSKASLCHERVWVCEVCEQAPAVVTCKADAAALCVACDTDIHSANPLASRHERAPVIPFYECPNMPNNNTATNANNDNLDCNVLLNEDGGGDDPLKHDYVDDDYDDYDDDENDHNNLLNHQEDDNDAEICCAEEAATASWLIPEANRNNLTNINGGNSEGEDKMVKDKLKFKAYMQSIDFLQDVENYVDLEYLGTTTTITTPTTPTAHMGADSMVPVHTPEVIEHSSTKVSVETARSLDVDAASKCNYVYRTTSLNXCVSSSSIDVGIVPDSNTTTDISTPYHDPRGVFEIPPRVVHPGGHVEVMGREARVLRYREKRKNRRFEKTIRYASRKAYAETRPRIKGRFAKRTEVEVEQIYSSSLLPDQGYGVVPSY

SEQ ID NO: 3151 - protein, 426 aa, Zea mays
MGRHSCCYKQKLRKGLWSPEEDEKLMNHITKHGHGCWSSVPKLAGLQRCGKSCRLRWINYLRPDLKRGAFAQDEEDLIIELHAVLGNRWSQIAAQLPGRTDNEIKNLWNSCIKKKLRQKGIDPSTHKPLTEADRGGAAPTISTERTSGSSDVNPSSTGPLGNLSPLLSETAQSSMLMPVYDKNRAETPNLARPKLPPKELFLEQLTAGHESPSTCHSSGQTLYFPFQQPLGYNSESGSSDGANMNSLWFNQSDFNCSTISTVMPPVSPSALSTSMGLNLPPDNPRHGGTGIGSTAVDSFYWDGTNPSSSSSTGSRGSNSMGFEPQSTSTILENSVFTWTDIGQEKDTRAHLVAELKWPDSFAETTTAMQNQSQTLYDDVIKAESQFSIEGICASWFQNQQPQQQLQVAPDMYDKDLQRMQLSFENI

SEQ ID NO: 3152 - protein, 380 aa, Arabidopsis thaliana
MRSRPHRVVHDLAAAAAADSTSVSSQDYRWSEIPEELLREILIRVEAADGGGWPSRRSVVACAGVCRGWRLLMNETVVVPEISSKLTFPISLKQPGPRDSLVQCFIKRNRITQSYHLYLGLTNSLTDDGKFLLAACKLKHTTCTDYIISLRSDDMSRRSQAYVGKVRSNFLGTKFTVFDGNLLPSTGAAKLRKSRSYNPAKVSAKVPLGSYPVAHITYELNVLGSRGPRKMQCLMDTIPTSTMEPQGVASEPSEFPLLGTRSTLSRSQSKPLRSSSSHLKETPLVLSNKTPRWHEQLRCWCLNFHGRVTVASVKNFQLVAAGASCGSGTGMSPERQSERIILQFGKVGKDMFTMDYGYPISAFQAFAICLSSFETRIACE

SEQ ID NO: 3153 - protein, 256 aa, Oryza sativa (indica cultivar-group)
MEGEDLGSWLGLGIGGGGYAYGGDDCRRSPSSPSPVQMLFSQHVKEEITRGYDHGRDEEQASGSKIMKGERGARLRVMRSIRNSGGDGSRSRVLSLGDDGGDGGSGSGGGGGTRKKLQLTKEQSTLLEDSFRVHNILSHAQKHELARQLKLKPRQVEVWFQNRRARTKLKQTEVDCEFLKRCCESLTEENKQLKHELMELRRLASAAAAAAGSQLYVQFPRAAAAAMVNVCPSCEKVTVMGGGGGETGKSSSSYSS

SEQ ID NO: 3154 - protein, 226 aa, Glycine max
MTRAFRILNSADNATAVAAAAPPPEAVALESDFVVILAALLCALICVVGLVAVARCAWLRRGSGAGNSPRQALANKGLKKKVLQSLPKFAYVDSNPSKWLATSECAICLAEFAAGDEIRVLPQCGHGFHVPCIDTWLGSHSSCPSCRQVLAVARCQKCGRFPATGAGASRTPATEPELKSREDNNAASYSNNNINNNSDRGGSNSNSNCNMEHHHHSHHVNSGFLP

SEQ ID NO: 3155 - protein, 256 aa, Zea mays
MAIDDESPLRVNPRGGAMGGGERDGAENQRWPPWLKPLLGTSFFGQCKLHADAHKSECNMYCLDCMNGALCSQCLAYHRDHHAIQIRRSSYHDVIRVSEIQKVLDISGVQTYIINSARVVFLNERPQPRPGKGVTNTCEVCERSLLDTFRFCSLGCKIVRTSGDFRIRKKHAIVAKKKREKKHAPQQKQHRGAADSADDDDDDSSTSTSGGSDKSSVVQSFTPSTPPATTANSFRAGKRRKGVPHRSPFGSLVVEF

SEQ ID NO: 3156 - protein, 274 aa, Zea mays
MGRGRIEIKRIENNTSRQVTFCKRRNGLLKKAYELSVLCDAEVALVVFSSRGRLYEYANNSVKATIERYKKAHAVGSSSGPPLLEHNAQQFYQQESAKLRNQIQMLQNTNRHLVGDSVGNLSLKELKQLESRLEKGISKIRARKTLIAEFLFQSELLAAEINYMAKRETELQNDHMNLRTKIEEGEQQLQQVTVAQSVAAAAATDVELNPFLEMDTKCFFPGGPFATLDMKCFFPGSLQMLEAQQRQMLATELNLGYQLAPPDTDVANNNPQQF

SEQ ID NO: 3157 - protein, 428 aa, Oryza sativa (japonica cultivar-group)
MGRHSCCYKQKLRKGLWSPEEDEKLMNHITKHGHGCWSTVPKLAGLQRCGKSCRLRWINYLRPDLKRGAFSQEEEDLIVELHAVLGNRWSQIATRLPGRTDNEIKNLWNSCIKKKLRQKGIDPNTHKPLAEVDRSKATPTISNDRTSESSDVDPSSGVALHNLSHLLSETAQSSELLPVKVTKPRTQAPGLARLKVPPKELFLDQLTSGHENLPSCRSSGPIPNFPFQQLLCYNNDFNSMDVGNRNSLWYNQNESSSSTISTVMPPVSPSTLSTSTGLNPSPDNANSRGTGIHNSQFYWDTNNPSSSSSTGSSGNNGLGFELQSTSSLLETNIFPWSDLAPEKDSQAQLEEELKWPDLLHGTFSEMPAPMQNLSQSLYEDVVKAESQFNMEGLCAAWSQNLLPQQHLPVVSDMYDKDLQRMSLSFENI

SEQ ID NO: 3158 - protein, 247 aa, Misopates orontium
MASLSDQSTEVSPERKIGRGKIEIKRIENTTNRQVTFCKRRNGLLKKAYELSVLCDAEIALVVFSSRGRLYEYANNSVKETIDRYKKASSDSSLNGSISEANTQYYQQEASKLRAQISNLQNQNRNMLGESLGALSLRELKNLESRVERGISRIRSKKNELLFAEIEYMQKRQEIDLHHNNQYLRAKIAESERVQGQHMNLMPGGSSGFEQLVETQPFDARNYLQVNGLQQPNNDYPRQDQLPLQLV

SEQ ID NO: 3159 - protein, 352 aa, Antirrhinum majus
MGRSPCCDKVGLKKGPWTPEEDQKLLAYIEEHGHGSWRALPARAGLQRCGKSCRLRWTNYLRPDIKRGKISLQEEQTIIQLHALLGNRWSAIATHLPKRTDNEIKNYWNTHLKKRLAKMGIDPVTHKPKSDTLMSNDGQSKNAANLSHMAQWESARLEAEARLVRQSKLQPPSANSFQASTSNPVQKSMGQARCLDVLKAWNGVVWGKNDEAAGVSVTVTTGIVGELGSPTSTLSSAAGTNGIMKEESEEEWKQMPENRDEIGNATPFTSNWESEQVALNSSEACSSREFRGKLYGLVTECFLCRWRGMRIVGYTNSGGNDVGVSDYYEDNKNYGNSILNLVNSSPSHSPIF

SEQ ID NO: 3160 - protein, 295 aa, Glycine max
MDIRKRGRPEPGFSLNGGFKKSKQEMESLSTGVGSKSKPCTKFFSTAGCPFGEGCHFLHYVPGGYNAVAHMMNLTPAAPLPPTRNVAALPHVPNGSAPSAVKTRICNKFNTAEGCKFGDKCHFAHGEWELGKHIAPSFDDHRAMGPPGAGRLAGRMEPPGPAASFGANATAKISVEASLAGAIIGKGGVNSKQICRQTGAKLSIREHESDPNLRNIELEGSFEQIKEASNMVKDLLLTLQMSAPPKTTPGVPGAPASHGSNFKTKLCENFTKGSCTFGDRCHFAHGAAELRKSGV

SEQ ID NO: 3161 - protein, 273 aa, Triticum aestivum
  misc_feature (191)..(191): Xaa can be any naturally occurring amino acid
LLEQVCTKKQSRTGPEFPGYRRPTRPINRSPKVLCSACEAAEARVVCCADEAALCARCDRDVHAANRLAGKHHRLPLLSAASNPPAVSAPNCDICQEGHAYFFCVEDRALLCRSCDVAVHTANAFVSAHRRFLLTGVQVGLEPDEQEESVPEPEPEPQPPNNASSAPLPPPMCHRKRSPTPLYSDGDIDWXAARTSASTGNLPDWSVLDEQFGSATPAMRPAEPGGNPSPLPKKKPPGGPSRAGKPTTFFWPGALPGTWPPGNQFSSGVPPKF

SEQ ID NO: 3162 - protein, 213 aa, Brassica rapa subsp. pekinensis
MVRGKTQMKRIENATSRQVTFSKRRNGLLKKASELSVLCDAEVSLIIFSPKAKLYEFASSNMQDTIDRYLRHTKDRVSTKPVSEENLQHLKHEAANMMKKIEQLEASKRKLLGEGIGSCSIEELQQIEQQLEKSVKCIRARKTQVFKEQIEQLKQKEKALAAENKKLTEKWGSHEIEVWSNKNQESGKGDEESSPSSEVETELFIGLPCSSRK

SEQ ID NO: 3163 - protein, 213 aa, Cardamine flexuosa
MVRGKTQMKRIENATSRQVTFSKRRNGLLKKAFELSVLCDAEVSLIIFSPKGKLYEFASSNMQDTIDRYLRHTKDRVSSKPVSEENMQYLKFEAANMMKKIEQLEASKRKLLGEGIGTCSIEELQQIEQQLEKSVKCIRARKTQVFKEQIEQLKQKEKALAAENGKLSEKWGSHETEVWSNKNQESGRGDEESSPSSEVETQLFIGLPCSSRK

SEQ ID NO: 3164 - protein, 301 aa, Arabidopsis thaliana
MKRLSSSDSMCGLISTSTDSFGYTTDEQSPRGYGSNYQSMLEGYDEDATLIEEYSGNHHHMGLSEKKRRLKVDQVKALEKNFELENKLEPERKTKLAQELGLQPRQVAVWFQNRRARWKTKQLEKDYGVLKGQYDSLRHNFDSLRRDNDSLLQEISKIKAKVNGEEDNNNNKAITEGVKEEEVHKTDSIPSSPLQFLEHSSGFNYRRSFTDLRDLLPNSTVVEAGSSDSCDSSAVLNDETSSDNGRLTPPVTVTGGSFLQFVKTEQTEDHEDFLSGEEACGFFSDEQPPSLHWYSASDHWT

SEQ ID NO: 3165 - protein, 332 aa, Thellungiella halophila
MERVEAALKSSIRKEMALKTTTPVYDECMAMTTVQTGFPADDFSVDDLLDLSNDDVFADDDVEPKAQQEEMLRVSSSEEPHDHGDASHRDFGSLPLSELSVPADELANLEWLSHFVDDSFMEYSAPNLTGTSTKPAWLTGDRKHPVTPATEESCFNSPVPAKARSKRNRNGGKVWSLGSSSSSGPSSSSSTSSSSSSGPSSPWFSGAELPEPFATSEKPPVPKKHKKRSAESVYSGQPLQQRRCSHCGIQKTPQWRAGPMGAKTLCNACGVRYKSGRLLPEYRPACSPTFSSELHSNHHRKVMEMRRKKEPTDDNATGLNQLVHSPQAVPSF

SEQ ID NO: 3166 - protein, 190 aa, Arabidopsis thaliana
MAFAGTTQKCMACDKTVYLVDKLTADNRVYHKACFRCHHCKGTLKLSNYNSFEGVLYCRPHFDQNFKRTGSLEKSFEGTPKIGKPDRPLEGERPAGTKVSNMFGGTREKCVGCDKTVYPIEKVSVNGTLYHKSCFKCTHGGCTISPSNYIAHEGKLYCKHHHIQLIKEKGNLSQLEGGGENAAKDKVVAA

SEQ ID NO: 3167 - protein, 410 aa, Picea abies
  misc_feature (161)..(161): Xaa can be any naturally occurring amino acid
  misc_feature (177)..(177): Xaa can be any naturally occurring amino acid
MSMPKLCDVCQVSNSVLYCRAHTAQLCLVCDVKIHGGSKASLCHERVWVCEVCEQAPAVVTCKADAAALCVSCDTDIHSANPLASRHERAPVIPFYECPNMPNNNTATNANNDNLDCNVLLNEDGGGDDPLKHDYVDDDYDDYDDDENDHNNLLNHQEEDXDAEICCAEEAATASWXIPEANRNNLTNINGGNSEGEDKMVKDKLKFKAYMQSIDFLQDVENYVDLEYLGTTTTITTPTTPTAHMGADSMVPVHTPEVIEHSSTKVSVETARSLDVDAASKCNYVYRTTSLNHCVSSSSIDVGIVPDSNTTTDISTPYHDPRGVFEIPPRVVHPGGHVEVMGREARVLRYREKRKNRRFEKTIRYASRKAYAETRPRIKGRFAKRTEVEVEQIYSSSLLPDQGYGVVPSY

SEQ ID NO: 3168 - protein, 714 aa, Ostreococcus tauri
MTFGDDFEFHFDGLIDDGVGFDAWCDEEIDLSAFASEDALDCAFGIELTPTPAPMKRAHGGSSGGRASKRRTNGRTQVALPFSPREDDLSTWEEDDYPMIMSPETKAKLKGQWSTEEDQKLVGLVEKYGVRRWSYIARALSGRVGKQCRERWNNHLAPDIKRGTWTLDEEEKFIEAHLELGNKWSYIAKRLPGRTENSVKNHWNATRRRKDGQMTTFRAYVLEAFEKRAHEDCSTPRSKSQSTTSDSLECSMRASHKPSSPSPSYSAMKDEVTKLLKFETNSECAHGLVFQILNRQLSARIDASSSRMRADISAHSLRALHRSVAFLSRVGGEIMLDAREDGREGSLTLKSVNANRSAFARVRVLARAFDAFEVRGKRVQACALAKHVLASLRASARAETLSIELADDDAAREEPRVVVRTTSAKTGVTRTYEMCEVIDCEHVDAEMDAEAMPGKCVMRARAFGALLQHFASAAQEDVTITFGIEGEVCVEVDEGRIGNSSGNILTLSSFATAGAGLSQALQTSVSVRRDDESILFYRNTAGSKIEVTVNLKDLRGVVQLCEASDVDLAIYCAQAGAPVIAKPTADYKLFHQHGESQQAAAPSVDFEAELVLATVLPPEIANDASTQSERAEPSAPSAAQLPNVPIGSQPWSAVPDTEDGSQREIGGADEVGALPRPWGQNASTIANVSADEDWHATNVDDFVEATPPEKRRRS

SEQ ID NO: 3169 - protein, 302 aa, Glycine max
NILSEDVVQHKTCNEMAFFPANFMLQTPHHDDHHHHQPPPSLTSILPTCAPQEYHGGVTILGKRSMSFSSGIEHGEEANNAEEDLSDDGSQAGEKKRRLNMEQVKTLEKSFELGNKLEPERKMQLARALGLQPRQIAIWFQNRRARWKTKQLEKDYDVLKRQYEAVKSDNDALQAQNQKLQAEILALKSREPTESINLNKETEGSCSNRSENSSDIKLDISRTPAIDSPHSTHQQQPSRPFFPPSSVRPAGVAQLFQTSSRPELASCQKIDQMVKEESLSNMFCGMDDQSGFWPWLEQQHFN

SEQ ID NO: 3170 - protein, 239 aa, Brassica napus
MEGGASDEVAESSKKIGRGKIEIKRIENTTNRQVTFCKRRNGLLKKAYELSVLCDAEVALVIFSTRGRLYEYANNSVRGTIERYKKACSDAVNPPSVTEANTQYYQQESSKLRRQIRDIQNLNRHILGESLGSLNLKELKNLEGRLEKGIGRVRSKKHEMLVAEIEYMQKREIELQNDNMYLRSKISERAGMQQQEASVIHQQGTVYESSSHQSEQYPIHLLQQSILLWRQEEVKKEYK

SEQ ID NO: 3171 - protein, 245 aa, Petunia x hybrida
MGRGRVQLKRIENKINRQVTFSKRRSGLLRKAHEISVLCDAEVGLIVFSTKGKLFEYSTDSCMERILERYERYSYAERQLSGATDNDTPGSWTLEHAKLKARLEVLQRNQKHYAGEDLDSLSMKELQNLEQQLDSALKQIRSRKNQLMHESISELQKKDKALQEQNNKLSKQVKEREKELAQQSQWEPQSHDLNSSSFVLSQPLNSLHLGEAYPSAGDNGEVEGSSRQQPPNTVMPPWMLRHLNG

SEQ ID NO: 3172 - protein, 345 aa, Glycine max
PRVRAKPKTKNQTQTKPTKISPISLSASCSFCVPNSFSRLYPDSPESTLKPALMANNPSDAPADDFLEQILGLPNFASADSGLSAADVGLAGAATQAPMMLQLNSADANAHLAGAAFHAPVYQLGLSLDQGKGGFMKPEEASASGKRFRDDVVDNRAKNVFHGQPMPTTMPAAPHPPAIRPRVRARRGQATDPHSIAERLRRERIAERIRALQELVPSVNKTDRAAMLDEIVDYVKFLRLQVKVLSMSRLGGAGAVAPLVTDIPLSSVEEEGGEGARNRPAWDKWSNDGTERQVAKLMEENVGAAMQFLQSKALCIMPISLASAIYQSQPPDTSSIVKPETNPPS

SEQ ID NO: 3173 - protein, 212 aa, Verbena x hybrida
MGRGKIEIKRIENSSNRQVTYSKRRNGIMKKAKEISVLCDAQVSVIIFASSGKMHEFCSPSTTLVDMLDQYHKLSGKRLWDAKHEQLDNEINRVKKENDSMQIELRHLKGEDISTLNYKELMVLEEALENGISTLKAKQMEFVRMMRKHNEMIEEENQSLQFKLRQLHLDPMDDNVMEAQAVYDHQGVADYEAQMPFAFRVQPMQPNLQERF

SEQ ID NO: 3174 - protein, 224 aa, Medicago truncatula
MKIQCDACHKQEASLFCPADEAALCNQCDRNIHYANKVSAKHKRFTLHHPTSKDTPLCDICKERRAYLFCKEDRAILCRECDIPIHEINKLTKQHNRFLLTGVKIGASSSCSNPTISNGSELRTSSPRPSSFSSENNSCSQSSFKENMVCDTVSTSSISEYLIETIPGYCMEDLFDASFAPNNVFCNKDYYEQNQDLQVINMSDWVPQSQVRFPQLSANSNVPN

SEQ ID NO: 3175 - protein, 175 aa, Draba nemorosa var. hebecarpa
MVRGKTQMKRIENATSRQVTFSKRRNGLLKKAFELSVLCDAEVSLIIFSPKGKLYEFASSNMQDTIDRYLRHTKDRISSKPVSEENMQHLKHEAANMMKKIEQLEASKRKLLGEGIGTCSIEELQQIEQQLGKSVKCIRARKTQVFKEQIEQLKQKEKALAAENEKLSEKWGSNE

SEQ ID NO: 3176 - protein, 428 aa, Arabidopsis thaliana
MNLDLNLGPGPESDLQPAPNETVNLADWTNDPPERSSEAVTRIRTRHRTRFRQLNLPIPVLSETHTMAIELNQLMGNSVNRAAMQTGEGSERGNEDLKMCENGDGALGDGVLDKKADVEKSSGSDGNFFDCNICLDLSKEPVLTCCGHLYCWPCLYQWLQISDAKECPVCKGEVTSKTVTPIYGRGNHKREIEESLDTKVPMRPHARRIESLRNTIQRSPFTIPMEEMIRRIQNRFDRDSTPVPDFSNREASERVNDRANSILNRLMTSRGVRSEQNQASAAAAAIVAASEDIDLNPNIAPDLEGESNTRFHPLLIRRQLQSHRVARISTFTSALSSAERLVDAYFRTHPLGRNHQEQNHHAPVVVDDRDSFSSIAAVINSESQVDTAVEIDSMALSTSSSRRRNENGSRVSDVDSADSRPPRRRRFT

SEQ ID NO: 3177 - protein, 219 aa, Hordeum vulgare subsp. vulgare
MGATEDSSSGSETTTSSSVEALASPPSPTATTASSKKKRARNDGRHPTYRGVRMRSWGKWVSEIREPRKKSRIWLGTFATAEMAARAHDVAALAIKGRAAHLNFPDLAHELPRPATAAPKDVQAAAALAASADFPASATATANAGAKNPDGPEPNAASASTPPDTAEDALFDLPDLLFDLRHGPPSCQVSCASTWDDDVAFAGPGAGVFRLEEPLQWEY

SEQ ID NO: 3178 - protein, 464 aa, Humulus lupulus
MGRSPCCEKVGLKKGPWTPEEDQKLLAYIEEHGHGSWRALPAKAGLQRCGKSCRLRWTNYLRPDIKRGKFSLQEEQTIIQLHALLGNRWSAIATHLPKRTDNEIKNYWNTHLKKRLTKMGIDPVTHKPKIDALGSGSGNPKDAANLSHMAQWESARLEAEARLVRESKLLVTNNIVNNSNNNNNNNNSNSNNIAVLPHNHNHQLGSAPAHHFMNKPGGAIAPPPCLDVLKAWQGAWTKSSNSSRDCNTLAGMMAVDDLESPTSTLNFPDANHSYTRINNQTTTTVGGGFGTNTTTDHDQTDNVDGWKSCYGTTTTNTPTKVAMSDHNHNNNHMAVAPPTPPEFKERNMEHANTMSLQDIAFACSHDGGAWFVDHGFRAGATMDGTSDSVAVPTVALSNIIEGFTDAFMYNSEQEPNSAVVDVVGDGENSNDGSCGASGIFEENKNYWNSILNLVNTSPSGSPVF

SEQ ID NO: 3179 - protein, 265 aa, Humulus lupulus
MGRSPCCEKAHTNKGAWTKEEDDRLIAYIRAHGEGCWRSLPKAAGLLRCGKSCRLRWINYLRPDLKRGNFTEEEDELIIKLHSLLGNKWSLIAGRLPGRTDNEIKNYWNTHIRRKLLNRGIDPATHRPLNESGQETTNTSTTTTATTTTTTTASNTTTTISFAASTVKEEEKTTSVLLNPIQEQCPDLNLELRISPPYPHQQRQPDQLKSGGASLCFACSLGLQNSKECCCTISSMDSNNPSTSVGYDFLGLKSGVLDYRSLEMK

SEQ ID NO: 3180 - protein, 1000 aa, Kluyveromyces lactis NRRL Y-1140
MSGYYNRQYSHFHGNNDRYQTGRYAYQENGNRYKGFQRNGSGNRRYSREGFGSQLRNNENESRPIRSQSRGISEIPRNPFATRPVVSAKYDRDEFNTKYHYYDIVSKRLRNESSFKKWKSEKIPEHGYVTTTELIASDKQKPILMARQPEQTSVDPRIRPMNGDAVSGSISAKKRYRKLRSALVRNSRIPYDSFYIGPEPPKEIIVYPSASNQQPIAAALSEAIIKNYFKSFGEIAHFEQFMDPNSALPLYVYLIKFTGPVSQPDAPYKAAYKASEKFKDAPYTVSGIKFNVILNQNTVLNSIKDKLIKQNAARVTEVNKAKRAIAEKSSGQKPQVIRGVPYDLTQVVNNRPVLFVPAKITFYHRFNAADFRYQLRKYNWAKIIDHYTGVYIVFHDLENAKACLEYESGALVINSHRTHSPIQIEFTFIEPKRRLQSNITNQRDINKPRKIEYSSTEELLEASTKQILKDLHNIIKRDILRRLVGPIIFDTLNPANYPEVVERQKKLDDEKKKREESQKKTTIKAKPAEFDIFSLYGPASKTKKLKRDRKADLGKRHLYTEESPDHQRKKKPKVEHMSHLLNDEISTREDTVDSLNVGSNGENSPESSGYESEDIISDESKKQSSVITTPEEDLPESAASLPDERSKELLQYEGKYKPIASEFPTPVYPYDDFDLNKSKQLSLDKFQLALKDEEDFSILKGIVSEKSKDITTDYTPFLPYSMWKLYQQIEQNGIIRDNQIALNEKEFDSTLASTTGSFIADGFKKIPDKLKSSYLLHHRRLAQPLNTVHNHQEQNFMALNGTESTNQEADLEQDNHNASSRLNRVFQRRFQQDIEAQRAAIGFESDLLSLNQLTKRKKPVTFARSAIHNWGLYALEPIAAKEMIIEYVGESIRQPVAEMREKRYIKSGIGSSYLFRIDENTVIDATKRGGIARFINHCCEPSCTAKIIKVDGRKRIVIYALRDIGTNEELTYDYKFERETDEGERLPCLCGAPSCKGFLN

SEQ ID NO: 3181 - protein, 151 aa, Arabidopsis thaliana
MMNRSMSFTGVSDHHHLTQKSPTTTNNMNDQDQVGEEDNLSDDGSHMMLGEKKKRLNLEQVRALEKSFELGNKLEPERKMQLAKALGLQPRQIAIWFQNRRARWKTKQLERDYDSLKKQFDVLKSDNDSLLAHNKKLHAEVYNIHTNSTNR

SEQ ID NO: 3182 - protein, 345 aa, Oryza sativa (indica cultivar-group)
MESGRLIFSTAGSGAGQMLFLDCGAGGGGGGVGGGAMFHRGARPVLGMEEGGRGVKRPFFTTPDELLEEEYYDEQLPEKKRRLTPEQVHLLERSFEEENKLEPERKTELARKLGLQPRQVAVWFQNRRARWKTKQLERDFDRLKASFDALRADHDALLQDNHRLHSQVMSLTEKLQEKETTTEGSAGAAVDVPGLPAAADVKVAVPDAEEPALEEAAAAFEEQQEQQVKAEDRLSTGSGGSAVVDTDAQLVVGCGRQHLAAVDSSVESYFPGGDEYHDCVMGPMDHAAGGIQSEEDDGAGSDEGCSYYADDAGVLFADHGHHHHHQHADDDEEDGQQISCWWMWN

SEQ ID NO: 3183 - protein, 259 aa, Catharanthus roseus
MALEALNSPTTPTPVFQYENAATLRYLDQPWAKGKRSKRPRSVEPPPPQHQQQQQPTEEEYLALCLIMLARGGAPSTTTLPLPPPPQQHNIPSSSSSDPPKLLYKCSVCDKAFSSYQALGGHKASHRKLSTASAGGGDDQSTTSTSTTTAAAATGRTHECSICHKCFPSGQALGGHKRCHYEGGAGAVGSTGNAASGVTSSEGMGSTNTHSNRDFDLNLPALPEFWLAAAAGDDEVSSPHPAKRSRFALPIKVENHQIN

SEQ ID NO: 3184 - protein, 229 aa, Zea mays
MEVAAASAAGYGFKADDDVDSLRATELRLGLPGTEEEEAEESQNKAPPPPPSTPRGKKRDVVASSGPEDAPKKRDCETDTDAAPPPAAKAQLVGWPPVRSYRKSCFQQQAAAKNKPAAALAEEAPAAGGLFVKVSMDGAPYLRKVDLKMYKGYRELREALEAMFLCFSGAGAADAPAVNPSDFAVTYEDKDGDLMLVGDVPFGMFISTCKRLRIMKGSEARGLGSVKNN

SEQ ID NO: 3185 - protein, 359 aa, Glycine max
MASPPPLSLNVVGSDTDPNTNTFPTVTSSLTPPSPRRSSPLQNLSPSILIIVTVLAVTVIVSLALCFLLRHLNRRCLRRFSSSAPPSAAATPIFASSRRISPEILHSSASASASVIDTLPVFTFSSVTRRSSSVAGDCAVCLSKFHHHDLLRLLPLCCHAFHAECIDTWLQSNLSCPLCRSAIVADDSDLAKILRPPSSGGSSDSFRLELGNISRRGTDGAAEGGSVARGGSRSYSIGSFEYLVDDESEVPFSHASRRSVDDAKEFPAPAEAPVRHNEANLAGEVGGVRSWLKDYVDRVSASISSRTASFRGSGRFFSGGGGSSGRRSDVVPVAASEYDVEGNRIGEEISEMFRWLSGV

SEQ ID NO: 3186 - protein, 970 aa, Oryza sativa
MWGRVCGGARLSVAVWVLTVRLGVEASGRGRRKAARPAPPSIVAFPVLPIPPLELRKWTAEEESALKAGIAKHGAGKWRTILKDPDFSNVLRYRSNVDLKDKWRNMNVTVNASGARDRVKAPVVKKPRSAPKHEGHSTSTAIAAVTSDGDDDVAEPVPLATSTSSKRSLSRLDNIIVEAVRSLNEPTGSYKTAIANYIEEQYWPPADFDHVLSSKLNDLTASGKLIKVNRKYRIAPSSSLSEGRSSKVVLLEDIKKEPTKLDREDVAVLTKSQIDAELARMRTMTAEEAAAAAARAVAEAEAIMAEAEAAVREAEAAEADAVAAQAFAEAAMATFKNRSSAKLDGFHEAKLQAGCIHKARASMFPLLSKSAILGRLIEENSDSDECVIILSDIPGGAKSFELVARFCYGLKIELSSENVVYLRCAAEHLEMTEETSGDNLINQTESFFNQVVLRSWKDSLEALRTCDGLLPHAEDLHIVKRCIESLAGKASIDPDLFGWPVSEHSTMQSPGGSVLWNGISTGAKVRNCSSDWWYDDASSLSFPTYKRLISSMESRGIKQEIIAGSLTYYAKKFLPGLNRRQSTGPMPLPAATLSDEEQRRLLEEIDRMLPLQRGLISTNVLLWLLRTAMILKVDRACISNLEKRVGMQLDEATLEDLLLPNFSYTMDTLYNVECVHRILDHFLAMDQTMGGGGASPCLDDVMASPSLAPITAVAKLIDGYLAEIAPDINLKPLKFQSLAAVLPEYARPLDDGLYRAIDVYLKSHPTLPEAEREQLCRLIDCQKLSLEACTHAAQNERLPLRVVVQVLFFEQLQLRTSVAGCLLVSDNLEASSRTLRGGGAVAASGEAGCWATAAVRENQALRVGMDSMRLRLMELERECSDMRQDIRKLGRGRRRLRGGGGIVAGGKDGGGWAARVQRMLTPRMMKLQMCSAQHDAAEQQRMNNEHKKVEKVAKNKKQLSMDDGDDEEEA

SEQ ID NO: 3187 - protein, 197 aa, Brassica napus
MILCIFKRQCHLLPLINITAKVVLINWASVGLSMALGETPGRVDGAGESMSDLTAEQLFKINELHMKTVQEENMLTKQSATLQEDTADMLIAVAAFHKERIGEADVEVERALDKYEDEMARMLAEADKLRLTTLTKIVEILAAVQAADFLLAGKKLHLSMHEWGRERERRLLEACGDDSGGEFYRRVNFVGRTLSNM

SEQ ID NO: 3188 - protein, 410 aa, Picea abies
MSMPKLCDVCQVSNSVLYCRAHTAQLCLVCDVKIHGGSKASLCHERVWVCEVCEQAPAVVTCKADAAALCVSCDTDIHSANPLASRHERAPVIPFYECPNMPNNNTATNANNDNLDCNVLLNEDGGGDDPLKHDYVDDDYDDYDDDENDHNNLLNHQEEDNDAEICCAEEAATASWLIPEANRNNLTNINGGNSEGEDKMVKDKLKFKAYMQSIDFLQDVENYVDLEYLGTTTTITTPTTPTAHMGADSMVPVHTPEVIEHSSTKVSVETARSLDVDAASKCNYVYRTTSLNHCVSSSSIDVGIVPDSNTTTDISTPYHDPRGVFEIPPRVVHPGGHVEVMGREARVLRYREKRKNRRFEKTIRYASRKAYAETRPRIKGRFAKRTEVEVEQIYSSSLLPDQGYGVVPSY

SEQ ID NO: 3189 - protein, 217 aa, Arabidopsis thaliana
MDQQGQSSAMNYGSNPYQTNAMTTTPTGSDHPAYHQIHQQQQQQLTQQLQSFWETQFKEIEKTTDFKNHSLPLARIKKIMKADEDVRMISAEAPVVFARACEMFILELTLRSWNHTEENKRRTLQKNDIAAAVTRTDIFDFLVDIVPREDLRDEVLGGVGAEAATAAGYPYGYLPPGTAPIGNPGMVMGNPGAYPPNPYMGQPMWQQPGPEQQDPDN

SEQ ID NO: 3190 - protein, 337 aa, Oryza sativa (japonica cultivar-group)
MRERQRWRPEEDAILLAYVRQYGPREWSLVSQRMNRPLHRDAKSCLERWKNYLRPGIKKGSLTDDEQRLVIRLQAKHGNKWKKIAAEVPGRTAKRLGKWWEVFKEKQQRELRDRDRRRLPPPLDGDERGCAGGRYDWLLEDFADKLVNDHHRRMMAAPILPPWMSSSPSSSSSPSVTLSLASAAVAPAPAAPPPTWGGGGGGEVVVAELMECCREMEEGQRAWAAHRKEAAWRMKRVEMQLETERACRRREATEEFEAKMRALREEQAAAVERVEAEYREKMAGLRRDAEAKEQKMAEQWAAKHARLAKFLDQVAACRRWPPVEINGGGGGGPGGGR

SEQ ID NO: 3191 - protein, 284 aa, Glycine max
MDELEETLLTQIDWESFLDDIPELNVDDFLQDDNAVPVVTDNHSSPNDDPVLSEIENMLMTQAENDAVVLPETPSSEAGYYKLFEEILVEEPKEGPVSPPSKIESEEGSDKDKTDDAASDEPMSKKLKRQLRNRDAAVRSRERKKLYVKNLEMKSRYLEGECRRLGHLLQCCYAENNALRLCLQLRGTYGASMTMQESAVLLLEPLLLGSLLWCMGIICHLSLPLMLWVAAVLPRENIEQKGLRRVTQKGSESKISECFQMQSFLKSRKSRASRTKMKFNFIVF

SEQ ID NO: 3192 - protein, 103 aa, Brassica napus
MAAQKLGSLLRQHFFSLFFLFVGCFLFPKGSDCKHKKRKKKNLRTVSSGSGSGLSSPWSSLKRFYLSTTRISKPRSQTHPNGQLTTLTSARSSHNSLVTLIQP

SEQ ID NO: 3193 - protein, 256 aa, Triticum aestivum
MEPSSQPEPVVGVATAGSQAYPPPAAYPAPAMPAAIPPGSQPAVPFPANPAQLSAQHQLVYQQAQQFHQQLQQQQQQQLREFWATQMEEIEQATDFKNHTLPLARIKKIMKADEDVRMISAEAPVVFAKACEVFILELTLRSWMHTEENKRRTLQKNDIAAAITRTDIYDFLVDIIPRDDMKEEGLGLPRVGLPPAALGAPADAYPPYYYVQAQQVPGVGMMYGGQQGHPVAYAWQQPQGQQAEEAPEEQQQSPSN

SEQ ID NO: 3194 - protein, 210 aa, Phalaenopsis hybrid cultivar
MGRGKIEIKRIENSTNRQVTFSKRRNGIMKKAKEISVLCDAQVSLVIFSSLGKMFEYCSPSTTLSKMLEKYQQNSGKKLWDAKHENLSAEIDRIKKENDNMQIELRHYEGEDLNSLNPKELIPIEEALQNGLTSVRDKQMDYLKMLKKNERMLEDENKRLTYLLHQQQMAMEGSMRELDIGYHHKDREYAAQMPMTFRVQPIQPNLQGNK

SEQ ID NO: 3195 - protein, 208 aa, Nuphar advena
LGDAEVALIVFSTRGKIYEYSSDSSITRILERYERFSCAERDPSVTDLDSQESWCVEYKKLKSKFEQLQKTQRRYMGEDLEPLSVKELQQLEHHLDSSLKDIRSRKIQLLLDSISELRRKEKSLQEQNEAIQKKLREQEAALNCLQSARSEQPQSRTVGFLFNSHSPTPDSGAYQTRNREAEESPHQHLQTQTSINNMPPWTLRLMTE

SEQ ID NO: 3196 - protein, 233 aa, Glycine max; identical to SEQ ID NO: 193

SEQ ID NO: 3197 - protein, 236 aa, Glycine max
MMSTTSHPIVHHSLFDEQDQIPTQMGFFSFPTNLTFPPLGCHQSSLKAFSSIAPSSLAISQLDSASNLTAETLFSTTAQKSREDLTSSFGGGQFLSLHRSSVNPWALGEVAECFSSKRSGFDDHHFRISAMKMKKIKARRKVREPRFCFKTMSDVDVLDDGYKWRKYGQKVVKNTQHPRSYYRCTQDNCRVKKRVERLAEDPRMVITTYEGRHVHSPSNDLEDSQTPSQLDSFLLW

SEQ ID NO: 3198 - protein, 162 aa, Brassica napus
RDKKGPWLLVGNLQARLLPSSQPVPEMIDVDAIEDDVVESSASDFAEAISKSTGSRRRRLTVGVESGGTTNKRRRVPPNQPVIDCENVPDTSMAPPPPPPEEPKFSCPICMCPFTEEMSTKCGHIFCKGCIKMAISKQGKCPTCRKKVTARELIRVFLPTTR

SEQ ID NO: 3199 - protein, 260 aa, Brassica napus
  misc_feature (18)..(18): Xaa can be any naturally occurring amino acid
  misc_feature (25)..(25): Xaa can be any naturally occurring amino acid
QLRFFFSSSWMKSKDPRXVRVSRAXGGKDRHSKVCTLRGLRDRRVRLSVPTAIQLYDLQERLGLDQPSKAVDWLLNAAKEEIDELPPLPVSPETFSLFNHHQAFLNLSQPPGQDSTQLGFKTNGCVEESNTTSSREETKNNHIGSYGTYQNMEQHQQQHTRFQADYPHHQHQLHSLVPIQSQFLVCPMTASSTTTTIQSLFPSSSSAGSRTMETTDPRQMVSHFQMPSMGSSSSSQNISTLYSLLHGGSNPMPSVQFNRK

SEQ ID NO: 3200 - protein, 299 aa, Arabidopsis thaliana
MKIQCNVCEAAEATVLCCADEAALCWACDEKIHAANKLAGKHQRVPLSASASSIPKCDICQEASGFFFCLQDRALLCRKCDVAIHTVNPHVSAHQRFLLTGIKVGLESIDTGPSTKSSPTNDDKTMETKPFVQSIPEPQKMAFDHHHHQQQQEQQEGVIPGTKVNDQTSTKLPLVSSGSTTGSIPQWQIEEIFGLTDFDQSYEYMENNGSSKADTSRRGDSDSSSMMRSAEEDGEDNNNCLGGETSWAVPQIQSPPTASGLNWPKHFHHHSVFVPDITSSTPYTGSSPNQRVGKRRRRF

SEQ ID NO: 3201 - protein, 208 aa, Buxus sempervirens
EVALIVFSTKGKLFEYSTDSCMDQILERYERYCCAERELGAADTESQGSWTQEYTKLKSTIEVLQKNLRHLKGEDLESLRLKELQNLEQQLDNSLKHVRSRKNQLMHDSISELQKKEKELQEQNNMLNKKLKEKERAKTQQAQWEQQNQGPNSPSLQLSQPLPFLNIGGTYQTRSTRNQEEGGRPHHSNRTDALMPPWMLTYMNNLDD

SEQ ID NO: 3202 - protein, 339 aa, Glycine max
MNVTNKPNPYGSTNGFQSLLQQNGWEQGSSRLRPTKLYPAPTARYQDIVRDANLFWGTLQAFHKTLGTKYKISTVGGTPLDLHRLFVEVTSRGGIEKVIVDRKWKEVILTFNFKDTITNASFMVRKSYLSMLYHFEQVYYFGRQGIPPTTPDLMIRGQSCQPYSSTTIPEVAAVNDSPVQSTPVQAHDDMVSGTIDAKFDVGYVVTVTLGSEQLQGVLFHVPDNVSQSSHAEGTSSSQNLGDDTSNLQSRKRAKYAPRDPFRPKSNRSGYNFFFAENYARLKPSYHGQERAISKRIGFLWNNLSEAERQVYQEKGIRDKERYRTELMEYKSNNSTPNAQ

SEQ ID NO: 3203 - protein, 199 aa, Buxus sempervirens
EVALIIFSHNGKLTQYSSTNSRMESILERYESYACAERELIPADPNSQGSWSQEYTKLKSRIEALQGSQRKLMGEDLDFLSLKELQYIEQQIDSSLKHIRTRKNQLLCDSISELQRKEKALQEQNNKLDKELKERDKALAQYIYWKQQGQNPSSFLLSQPHPSLNIEGNFQARTRRDEAEGTELHTKTNGFMPPWMRHH

SEQ ID NO: 3204 - protein, 241 aa, Triticum aestivum
MNQVSEEPRDDPSKRVSGAAPAAARAGCFDCNICLDFAVGPVVTLCGHLYCWPCIYEWLRRDAAGGTISTAGRPCPVCKAALTLDSLVPLYGRGGSRSGKSRLRPALPRRPTVHRGAVEQQSARTSGGSRHRRVIVEPDSPTRSSRHTRVGAAQFDILYPPPALGRGMNAMNSTAGGVLGGMALALLPWVFGGQAPAPSYPLGELQNLSPRLRRQHMEVERSLHQLLFFLFVFVVLCLLLF

SEQ ID NO: 3205 - protein, 287 aa, Solanum lycopersicum
MKRFSFSDSSGKLLYPTEEKKENLGYSNEFQAMLDGLEDEDGIEESGCGTGKKRRLRVDQVQALEKIFEVDNKLDPDRKVKIAQELGLQPRQIAIWFQNRRARWKTKQLERDYNILKSNYEALQHNYTKVEQEKEGLITELKGLKEKLGEETLLSPVFQRPQEILNKLKNSSDFVDSKDGSSDSDSSGVMNEETYNISTLNYQQLMPKVSSYSNSLDHLSLSSSTYTQLMDPRASNSTSSSMRAYNNNNNNNDDNNNSNNQQQQQAVGRIEEAKWFYNRGFLQHLLC

SEQ ID NO: 3206 - protein, 206 aa, Buxus sempervirens
EVALIVFSTKGKLFEYSTDSCMDQILERYERYCCTERDLIAADTGSQGSWTLECAKLKSRIEVLQRSQRHLMGEDLESLRLKELQNLEQQLDTSLRHVRSRKNQLMHESISDLQKKEKELQEQNNMLIKKLKEKEKTIAQQAHWEQQSEGTNSATLQLSQPLPSLTIGGTYQTRSTGSQEEENHPRNRTHALMPPWMATHMNNAQM

SEQ ID NO: 3207 - protein, 204 aa, Decaisnea insignis
EVALIVFSHKGKLSEYSTDSSMERILERYERCSYAAQELVTIDPESQGSWPLESRKLKARLEVLQKKQSHFMGGDLDSMSIKEIQSLEQQLDYSLKQIRSRKNQLLYESISELQRTEKALQEQNDQLGKKIKEKENILTQQANWEQSNQGQNSPSFLLSQTLPSLNIGGPYQARGSSIGEEVGGGQPQTRPNTLMPPWVLRQVN

SEQ ID NO: 3208 - protein, 383 aa, Ceratopteris richardii
MNTFLSSGPHTYLNNLRCGEWGSGTAPGPIADPKSAAYYRDHTKNDKVNDLSNRLHSYGPPEALQYPNQHAIAADTEKMEVENSGKMAASVERSAQDAHASGALQEDVVAAYVDNMPACVAGVTLVPQGGRGTIPIRRIDNPTSRQVTFSKRRNGLLKKAYELSVLCDAEVGVMVFSATGRLSEFASTSMQKVLERYQEHSNGAPSRKVLLQDVEFWKREVLFLRDQLFHLKNYENHILGENQIPLDLAEIQRVETRLENALNKIRIQKVQVLHGEMQQIYKQEARLFEENNILRKKLAEATTINGMRGSMSTMTMSHEDLPGSTNQSYGTKALQGGCPSDTSTTTSNDPNHHSSHPPSHPSASQPLTLHLTSPCSPKLDLRL

SEQ ID NO: 3209 - protein, 239 aa, Ceratopteris richardii
MVRRKIKIKRIENATTRQVTFSKRRGGLLKKAHDLSVLCDADVGVIIFSSKGKLFQFANPSMKSVLERYYKAQGDAESADNVSSAENIEIDRITLFTEKLKALQRNVIGDDLERLSLRDLIHLEQQIHESLGRIRAKKEEMILDQLEDFKKKVTDARKTTNANSSLLDKLLDFCSSDMTSSHNFVDCEPLLISEAPQADASLAGRAATSEQSTDVRECSPPAKRLRITEDLNHSPVCME

SEQ ID NO: 3210 - protein, 371 aa, Oryza sativa (indica cultivar-group)
MAKPGLNDKLRHSGIIDIHFRREGSNPVYFAVLVKYEDLDGDVVQVDLMESKSAYGGAIEVWTPMRESWGSASAATPARPFVTNNLCGVLGGVLAMEMVIVLRTQEAYVQILQQLHRSTSLEMDPHSHKKAHEGLIGDNPDAYAVTTYQPVLMVEPSAAAAFPPAPQVAPAYPVNPMQLPEHQQHAIQQVQQLQQQQKEQLQAFWADQMAEVEQMTEFKLPNLPLARIKKIMKADEDVKMIAGEAPALFAKACEMFILDMTLRSWQHTEEGRRRTLQRSDVEAVIKKTDIFDFLVDIITDDKMKDDGMGSQAASMVSPYTSGGMGFSFDLYPNQHHLAYMWPPQEQQEQWPPQEQQEQKQKQDSDGGGQDE

SEQ ID NO: 3211 - protein, 310 aa, Zea mays
  misc_feature (104)..(104): Xaa can be any naturally occurring amino acid
  misc_feature (146)..(146): Xaa can be any naturally occurring amino acid
  misc_feature (176)..(176): Xaa can be any naturally occurring amino acid
  misc_feature (205)..(205): Xaa can be any naturally occurring amino acid
  misc_feature (228)..(228): Xaa can be any naturally occurring amino acid
  misc_feature (238)..(238): Xaa can be any naturally occurring amino acid
MDATARKRSRPETANGAAAAGKRSKDTESFQTGLSSKSKPCTKFFSTIGCPFGEGCHFLHFVPGGYAAVAKMLNLSSSAVSAPSRTHVDHAALTGASHPASTGXKTRMCTKYNTTEGCKFGDKCHFAHSERELAKPAYMSQEGPPXMGGRYGRAEPMQPAAMGPPAGNFGASATAXKISVDASLAGGIIGKGGVNTKQISRITGXSRLSIRDHESNPNLKNIELEGNXFDQIKQASDXVRDLIATISASMPAKNPSAAAAPAGGGRGGGPGGKSSNYKTKLCENFLKGACTFGDRCHFAHGETEQRRGAA

SEQ ID NO: 3212 - protein, 343 aa, Oryza sativa (indica cultivar-group)
MAKPGLNDKLRHSGIIDIHFRHHLESTLTTNPFDSPSTRTCSVLDEEPAPWHDRLDGLGGVMVPACSTTTGKERGAGGIEQDEILQQLHRSTSLEMDPHSHKKAHEGLIGDNPDAYAVTTYQPVLMVEPSAAAAFPPAPQVAPAYPVNPMQLPEHQQHAIQQVQQLQQQQKEQLQAFWADQMAEVEQMTEFKLPNLPLARIKKIMKADEDVKMIAGEAPALFAKACEMFILDMTLRSWQHTEEGRRTLQRSDVEAVIKKTDIFDFLVDIITDDKMKDDGMGFQAASMVSPYTSGGMGFSFDLYPNQHHLAYMWPPQEQQEQWPPQEQQEQKQKQDSDGGGQDE

SEQ ID NO: 3213 - protein, 155 aa, Xanthomonas oryzae pv. oryzae KACC10331
MSRKVAARKSRIHGNGMFALAPLRKGERIIQYKGRLRTHAEVDADDTGDVESGHTFLFTLSDDYVLDANYEGNVARWINHSCDPNCEAVIEEAEGDDRRKDKIFIEAKRDIKPGEELTYNYGITLAERHTPRLKKIWECRCGSKNCTGTMLQPKR

SEQ ID NO: 3214 - protein, 335 aa, Zea mays
PPHHTKPYYDLVPWLQSATISWFLVWKWNAARVPLCHCHLYKRTHQHHQHSSTLCTDRASIFAMSSLTTAASSSSSMEEHCYSVSAEEVVGTHLSLGIGGGGGGGDKRMLTTLPPSRTVVQLFGEVLSVQDGDEAQALRHHHTGRPTAASSRKKKRRDAAAGGASATDAAANGHHHQSKKTKTTAARRDDGGGGGGGGRKKLRLTAAQATLLEDSFRAHNILSHGEKQELARQAGLSARQVEVWFQNRRARTKLKQTEVDCDLLRRWCARLSDDNDRLRRDLADLRRAASSSSAGLGAVVVCCASCGADRQLALAAAADNVLPSVASPSHSPHLT

SEQ ID NO: 3215 - protein, 213 aa, Illicium floridanum
KRIENATNRQVTYSKRRGGIIKKARELTVLCDAQVSLIMFSSTGKFSEYCSPSATTKKIFDRYQHVSGINLWNSHYQKMQVELNKLKEENNKLRRKIRQRVGGDLDGLNEKELRGLEQNLVDCAKIVRDRKYHVINNESETFRKKIRNLEERHKELLSAMEGNPPSYMFEDNGAESTGDLGSRNSSLMFAFRVQPSQPNLHDVVYSTHELRLG

SEQ ID NO: 3216 - protein, 214 aa, Illicium floridanum
KRIENTTNRQVTYSKRRVGILKKAWELSVLCDAHVSLIMISNSGKLSEYCTPTTTTKSMLDRYQEVSGINLWSSNYEKLQTQLNKLKEENESLRKDISHKKGEDLIDLSFEELRGLEHSIEQHLKLVQEKKLRKIATQIETYKKKVRSALEQHKILLRELDAIDPQYNLCDGETDYEPALGLGNGSSQLLEFHMQDTNQTYDDTGFDFHDLRLV

SEQ ID NO: 3217 - protein, 218 aa, Illicium floridanum
KRIENSTNRQVTFSKRRVGILKKARELSVLCDAEVSLIMFSNSGKLSEYCTPSTSIKSILDRYQHVSGINLWSSHYQKMKSHLNKLQQENERLRKDIRHTKGEDLDGLSFDELRGLEHSIDEYLKVVSEKKMRKIVTQIDTCKKKVRSALEQHKLLLRETETIDHDPQYSLYDSETDFEPVLGLGNGHQQLEYHLQPNNHQAEVGDDIGYNFHDLRLG

SEQ ID NO: 3218 - protein, 213 aa, Zea mays
ITKGASLDCYMEGQPAKRRRVYSLEPNKVEQAAFARNYMNYLVPALMKIKERSTSSDQHSGYCDDNIQNVVKYEVDMAMVHSAQGFAWSNALSVKLQRDRVNVDCDTTSFGEGSSSSRVCGQNCEMVPLDNFPSNPSLKSNNKCKEMPEMKRGLREDDDGDEDEVINGQLKSLRRLMPGGEEMCSEQMVTELQSYVSCLQMQVNILRCLAETH

SEQ ID NO: 3219 - protein, 317 aa, Arabidopsis thaliana
MAVELMTRNYISGVGADSFAVQEAAASGLKSIENFIGLMSRDSFNSDQPSSSSASASASAAADLESARNTTADAAVSKFKRVISLLDRTRTGHARFRRAPVHVISPVLLQEEPKTTPFQSPLPPPPQMIRKGSFSSSMKTIDFSSLSSVTTESDNQKKIHHHQRPSETAPFASQTQSLSTTVSSFSKSTKRKCNSENLLTGKCASASSSGRCHCSKKRKIKQRRIIRVPAISAKMSDVPPDDYSWRKYGQKPIKGSPHPRGYYKCSSVRGCPARKHVERAADDSSMLIVTYEGDHNHSLSAADLAGAAVADLILESS

SEQ ID NO: 3220 - protein, 134 aa, Magnolia grandiflora
YQQESSKLRQQIGILQNANRHLMGEALSAMTVKELKQLENRLEKGISRIRSKKNELLFAEIEYMQKREVDLQNDNMYLRAKITENERAQQQMGMLPTPEYDVMPGFDSRNFLQVNLMDSSHHYSHQEQTALQLG

SEQ ID NO: 3221 - protein, 216 aa, Illicium floridanum
KRIENTTNRQVTFCKRRNGLLKKAYELSVLCDAEVALIVFSTRGRLYEYANNSVKGTIERYKKACTDTSNSGCITEANSQYYQQESSKLREQIGILQKANRHLMGDGISSMSIKELKQLENRLEKGIGKIRTKKNELLYAEIEYMQKRETDLQKDNMYLRAKITENERAQQHMNMLPGPEYDMMPQFDSRNFLQVNLLEPSHHQYSHQEQTTLQLG

SEQ ID NO: 3222 - protein, 220 aa, Oryza sativa (japonica cultivar-group)
MTAALQALLDPTALSLGLPTPAINKEEYLAICLAALACTRAGKALVGVGGQQQVQACSKWLCPAPAAPEELRFRCTVCGKAFASYQALGGHKSSHRKPPSPGDHYGAAAAAQQLASAGDSKEDSASSAAGSTGPHRCTICRRSFATGQALGGHKRCHYWDGTSVSVSVSASASAASSAVRNFDLNLMPLPESTAAAGIKRWAEEEEVQSPLPVKKLRMSN

SEQ ID NO: 3223 - protein, 104 aa, Triticum aestivum
RTAGKQADVDGIATYPSGCAAHASLPDEVEREFAFLQVRRAMLVCRVVAGRVVRGVDGDGDKVGYDSMVPVPPGGGGRGGEDDGELLVFNPRAVLPCFVIMYGS

SEQ ID NO: 3224 - protein, 260 aa, Glycine max
MALEALNSPTAATTPFRGYQEEEEDEEADLHLREPWAKRKRSKRPRFETEEEYLALCLIMLAQSGNTRNIHNNNTQLPSSSLSDKEASPPVKLTHRCTVCNKAFGSYQALGGHKASHRKASSESNPTASVSALANDSVSASTVGGGRMHECSICHKSFPTGQALGGHKRCHYDGGNNHSNSNANGNNSSGATTSDGGAASSSHTLRGFDLNLPAPLTEFWSPMGFDFGKKKVGGEQEVESPLPVTAKRPRLFTGEDDETA

SEQ ID NO: 3225 - protein, 246 aa, Antirrhinum majus
MASLSDQSTEVSPERKIGRGKIEIKRIENKTNQQVTFCKRRNGLLKKAYELSVLCDAEVALVVFSSRGRLYEYANNSVKATIDRYKKASSDSSLNGSISEANTQYYQQEASKLRAQISNLQNQNRNMLGESLGALSLRELKNLESRVERGISRIRSKKNELLFAEIEYMQKRQEIDLHHNNQYLRAKIAESERVQGQHMNLMPGGSSGYEQLVETQPFDARNYLQVNGLQPNNDYPRQDQLPLQLV

SEQ ID NO: 3226 - protein, 203 aa, Brassica napus
  misc_feature (187)..(187): Xaa can be any naturally occurring amino acid
MSSQESRASRGVRRRKAVIDLNEVPRDHEGTTSASVRADPTVAPSGGTVPSQPVPTMIDVDAIEDDVIESSASAFAEAKSKSAGARRRPLMVDAESGGTTRLPPNVSNKRRRIPPNQPVIDCEHVPVDVRESSPKPPPPPPEEPKFSCPICMCPFTEETSTKCGHIFCQGCIKTAISRQAKCPTCRXRVTVKELIRVFLPTTR

SEQ ID NO: 3227 - protein, 203 aa, Decaisnea insignis
DVALIIFSTKGKLAQYSSDSGMDRILDRYESYCYAERELAATDAESQGNWSLEYTKLKARVEVLQKNQRHFMGEDLTSMSFKELQNLEQQLDAALKQIRSRRNQLIYESISELQRKEKALQEQNNQLGKKLKEKEKALAQLRHWEDPNQAQNSPSFLLSQTLPSLNIGGPYRPRSSGGEEEQSRPETRPNTLMPPWMLRHVNQ

SEQ ID NO: 3228 - protein, 543 aa, Arabidopsis thaliana
MDFSDDDMIDNKSGEENYSYGGGNESDDYNDVVDTIIPSEKSYVILKEEDILKLQRDDIERVSSILSLSQVEVIVLLLHYNWCVSKVEDEWFTDEERIRKAVGLLKEPVVDFNGGEKDKKCRKVNIQCGICFESYTREEIARVSCGHPYCKTCWAGYITTKIEDGPGCLRVKCPEPSCSAAVGKDMIEDVTETKVNEKYSRYILRSYVEDGKKIKWCPSPGCGYAVEFGGSESSSYDVSCLCSYRFCWNCSEDAHSPVDCDTVSKWIFKNQDESENKNWMLANSKPCPECKRPIEKNDGCNHMTCSAPCGHEFCWICLKAYRRHSGACNRFVVEQAESKRALLQSEIKRYTHYYVRWAENQSSRLKAMRDLEKLQSVQLKELSDNQCTSETQLQFTVDAWLQIIECRRVLKWTYAYGYYLQDLPKRKFFEYLQGEAESGLERLHHCAENELKQFFIKSEDPSDTFNAFRMKLTGLTTVTKTYFENLVKALENGLVDVTHNEFPPDNETKSTQEKYEEYQDYEDDFLETQRLYDEALLSGCYYD

SEQ ID NO: 3229 - protein, 238 aa, Euptelea pleiosperma
MGRGRVQLKRIENKINRQVTFSKRRSGLLKKAHEISVLCDAEVALIVFSTKGKLFEYSTDSGMDMILDRYERYSSAERELVAHDPESQGSWSLEYAKLKAKLEVLQRNQRHFMGENVDSLSSKELQNLEQQLDSALKHIRTRKNHLMYESIAELQRKEKTLQEQNNQLEKKLKEKELTQQAHWEHQSSTSFLLSQTLPTLNIGGTYQVRGSGSEEEVAQPHARTNTLMPPWMLRHVNE

SEQ ID NO: 3230 - protein, 503 aa, Zea mays
  misc_feature (360)..(360): Xaa can be any naturally occurring amino acid
PTSDSRCVHGFSPVTLRSPLSSQKSSSGEKPCTHRESDVGQTNSCSLNNSSECENHTPSNDEISEPESNLEMAKTDQGGDVPSGEKVLKKPDKILPCPRCNSMDTKFCYYNNYNIKQPRHFCKSCQRYWTAGGSMRNIPVGAGRRKSKSSSASCRSVLIPVPGSSSVANPGGEASLFPLSVKANQAAVSFGPDSPLCTSMASVLKIGGGGEQVKSCSPASAAAAAQPRNGETQTQTCAPSSAATTPSDGPGNGLQKGAESAHQNQNQNQNGIIGHSNGVTPVHPIPFFPGPPFVYPWSPAWNGIPAMAAAVCAAPATAEAAISSEHGTASSTVQWNVPPAIVPVLPPGFCGPIPVPVIPXPSVWPLITPWPNAAWSAPWLGPSASVPPGSSRSSGSSTCSDSGCGSGSPVLGKHSRESRPQGDEKAERRCLWIPKTLRIDDPVEAAKSSIWTTLGIEPGDRGMFRPFQSKHGRQQELQASGAARALQANPAALSRSQSFQETT

SEQ ID NO: 3231 - protein, 238 aa, Ceratopteris richardii
MVRRKIKIKRIENATTRQVTFSKRRGGLLKKAHDLSVLCDAEVAVIIFSSKGKLFQFANPSMETVLGRYVKASRDPEAGDNGSSTDNVEADRLTVFTEKLKMLQSNVIGDDLERLSLRDLIHLEQQVHESLGHIRAKKDELILEQIDEFKQKMADTRRTTNANTSMLDRLVDFCSSGITGSQNIVASEPGYVVGVPRTDTLRAGWIATSDQSNDGPEYVPCAKRFRITEGLNESPASE

SEQ ID NO: 3232 - protein, 244 aa, Euptelea pleiosperma
MGRGRVQLKRIENKISRQVTFSKRRSGLLKKAHEISVLCEADVAVIVFSTKGKLFEYSTNSGMEGILERYERYYYAEQEVVATDPESLGNWSMEYAKLKAKVDVLQRTQRHFMGEDLDSLSLKELQHLEQQLDTAMKQIRSRKNQLMYESVVELQRKDKVLQEQNSMLEKKIKEMEKSIAQQRHWEQQNQGQNSPSFLLSQTLPSLTIGGTYQARCTGGEEEEARTQSRFNTHMPPWMLRHLNP

SEQ ID NO: 3233 - protein, 209 aa, Nelumbo nucifera
EVAVIVFSTKGKLFEYATDSGMERILERYERYSYAERELIAADSESQGNWSLEYTKLKNKIEILQRNQRHYVGEDLESLSLKELQNLEQQLDTALKQIRTRKNQLIYDSISELQKKEKALQEQNNILTKKLKEKEKEKEKEKALAQQAHWDQQNQGQSSPSFLLSQPLPSLAISGTYQGRSAACDDEEARSHARTNSLMPPWMLRHLNE

SEQ ID NO: 3234 - protein, 157 aa, Brassica napus
  misc_feature (144)..(144): Xaa can be any naturally occurring amino acid
SHPPSEEEYLAICLLMLARGSSSTNDGNDHPSPPAPPSDHHHRDYKCSVCGKSFPSYQALGGHKTSHRKPVSNTNCQDTINTGNGSVTNNGNITHKCSICFKSFPSGQALGGHKRCHYDGGNGNGSNNHGFDLNLPADHDETLXKSQLSGEESKSVS

SEQ ID NO: 3235 - protein, 410 aa, Picea abies
  misc_feature (120)..(120): Xaa can be any naturally occurring amino acid
MSMPKLCDVCQVSNSVLYCRAHTAQLCLVCDVKIHGGSKASLCHERVWVCEVCEQAPAVVTCKADAAALCVACDTDIHSANPLASRHERAPVIPFYECPNMPNNNTATNANNDNLDCNVXLNEDGGGDDPLKHDYVDDDYDDYDDDENDHNNLLNHQEDDNDAEICCAEEAATASWLIPEANRNNLTNINGGNSEGEDKMVKDKLKFKAYMQSIDFLQDVENYVDLEYLGTTTTITTPTTPTAHMGADSMVPVHTPEVIEHSSTKVSVETARSLDVDAASKCNYVYRTTSLNHCVSSSSIDVGIVPDSNTTTDISTPYHDPRGVFEIPPRVVHPGGHVEVMGREARVLRYREKRKNRRFEKTIRYASRKAYAETRPRIKGRFAKRTEVEVEQIYSSSLLPDQGYGVVPSY

SEQ ID NO: 3236 - protein, 473 aa, Glycine max
MQENKDPAIKLFGQKIAFAGEVDPPAISAGEIDSPPAMDVDKDEEDDFGDSETEDEKDKDPRAEKVSEKTKEADPPPNAADSKKTPEGIQNPNTPSIDEESAKSKTNKSENNNNNKTLKKPDKILPCPRCNSMDTKFCYYNNYNVNQPRYFCKACQRYWTAGGTMRNVPVGAGRRKNKNSASHYRHITISEALQAARIDAAPNGTHHLLKPNGRVLSFGLELDPPICDSMASVLNLTAEKKGTLNNNTRNGFHTIEDQRNKDNHNNNNNNGDDCSSASSITVSNEESGKSTSQESIMVPNSNGFIHHVPCISTLPWPYPFPSAAPAMCPPGFPMSFYPAAFWNIPWFPSQHSHHSAPTPRSPSSGPNSPTLGKHSRDDDAEKQDHLQEEQPPSRQRNGSVLVPKTLRIDDPSEAAKSSIWATLGIKNECVTGGGMFKGFQSKKEEKDHVVEASPVLRANPAALSRSLNFHENS

SEQ ID NO: 3237 - protein, 268 aa, Zea mays
MGRGKIEIKRIENTTSRQVTFCKRRNGLLKKAYELSILCDAEIALIVFSTRGRLYEYSSNSVRSTIERYKKASASTSGTAPVTDVNSLQYFQQEAAKLRQQIQTLQNSNRHLMGESTGNMTAKELKGLESRLERGIGRIRSKKHELLLAEIEYMQKRESDLHNENMFLRAKVAEAERALEQEAAEDQTMMVPAAVRGATTELKALPASFDASGYYQYQQHQHVVAAASAASSSQYAEQPQGQQEYHHQTALHLGYHVKIDSAADKGFL

SEQ ID NO: 3238 - protein, 109 aa, Triticum aestivum
MMEAGGGGGGGGFRDERVPQWGVQETRELIAARGELEREAAAAGRSAKTLWEAVADALRARGYRRTVDQCKCKWKNLVNRYKGKETSDPENGRQCPFFEELHAVFTERA

SEQ ID NO: 3239 - protein, 226 aa, Nuphar advena
MGRGKIEIKRIENTTNRQVTFCKRRSGLLKKAYELSVLCDAEVSLIIFSSRGRLYEYSNNSVKATIDRYKKACADSSNSGTVSEANAQYYQQEAYKLRQQISKIQQDNRQMLGEGINEMSVRDLKTLEGKLEKSIGKIRSKKNDLLNSEIQYMQKMGDDLQEENMYLRAKISENERAHQQQHISMMAGPSEYELLPTTFQHVNLLEPSHHHYSHQERTALQLGRDF

SEQ ID NO: 3240 - protein, 260 aa, Zea mays
MAADLPCDDAGVCMVCGVAAPSEVDLLRCSTCATPWHSPCLSNPPALSEAAIWSCPDCSGDPVAPAAPAAGGELVAAVRAIEADTTLSDAEKARRRQNILAGRSAASAPDDDVDDSAEDDVLNIFGRSFSCAFCMKLLDRPVTTPCGHNFCLKCFNRWTHNGASACGKCRRPIPYKMVQQPRINSAIVSAIRAARMSKNTNPAAAGSSAGSHHYIQNVDRPDRAYITERAQRGRKANASSGQIFVTTAPDHFGPILAEHD

SEQ ID NO: 3241 - protein, 223 aa, Amborella trichopoda
MGRGKIEIKRIENTTNRQVTFCKRRNGLLKKAYELSVLCDAEVALIVFSSRGRLYEYANNSVKTTIDRYKKACADSSHSGTVSEANSQYYQQEAAKLRNQIQVLTNTNRQLMGDSVGSMTVKELRTLENKLEKGISKIRSKKNELLFAEIDYMQNRELELQKDNMLLRAKIAENERAQHMNMLPGPEYDVLPPFDSRNYLQVNLLEPNHHNYSHQEQTALQLG

SEQ ID NO: 3242 - protein, 241 aa, Amborella trichopoda
MGRGRVELKRIENKINRQVTFSKRRNGLLKKAYELSVLCDAEVGLIIFSSRGKLYEFGSAGLSKTLERYQRCCYTPQDNSATDRETQNWSQELSKLKAKYETLQRSQRHLLGEDLGPLSVKELQQLERQLEVALSQARQRKTQILMDQMEELRRKERRLGDINKQLKSKLESDGQGSFRGIQGTWESGTVVGNNAFAVNPSHANPIDCEPTLQIGYHHFVSPESIPRTGPAESNFVQGWVL

SEQ ID NO: 3243 - protein, 216 aa, Gossypium hirsutum
MDFVVQDYDMVDSGSVSESGTDRPVNFSDEYVMLASSYPKRPAGRKKFRETRHPVYRGVRRRNPGKWVSEVREPNKKSRIWLGTFPKADMAARAHDVAAIALRGKSACLNFADSAWKLPVPASSDPKDIQKTVAEVAETFRTAEHSSGNSRNDAKRSENTEMEKGFYLDEEALFGTQRFWANMAAGMMMSPPRSGHDGGWEEHEVDDYVPLWSYSI

SEQ ID NO: 3244 - protein, 417 aa, Ipomoea nil
MLKEESCEVLDLDVTIGSSSGSRSGNKQNWARVCDICRSAACSVYCRADLAYLCGGCDARVHGANTVAGRHERVLVCEACESAPATVICKADAASLCAACDSDIHSANPLARRHHRVPILPISGTLYGPPTSNPCRESSMMVGLTGDAAEEDNGFLTQDAEETTMDEDEDEAASWLLLNPNPNPNPNPVKSNNSTNMCKGGNNNNNEMSCAVEAVDAYLDLAEFSSCHNNLFEDKYSINQQQNYSVPQRNMSYRGDSIVPNHGKNQFHYTQGLQQHNHHAIFNCKEWNMRILTRDMVSISSMDVGVVPESTLSDTSISHSRASKGTIDLFSGPPIQMPPQLQLSQMDREARVLRYREKKKTRKFEKTIRYASRKAYAETRPRIKGRFAKRTDVDTEVDQIFYAPLMAESGYGIVPSF

SEQ ID NO: 3245 - protein, 209 aa, Pachysandra terminalis
EVALIVFSTKGKLYEYSTDSCMDQILERYERYCCEERQLGVADTESQGSWTLEYTKLKSKIEVLQKNLRYLMGEDLESLRLKELQNLEQQLNNSLKHVRSRKNQLMHDSISELQKKEKVLQEQNNMLNKQLKEKEKAKTQQAQWEQQNLGPNSPSLQLSQPLPSLNIGGTYQTRSTRNQEEGGRPRHSNRTDALMPPWMLTHMNNNSDD

SEQ ID NO: 3246 - protein, 339 aa, Arabidopsis thaliana
MEQAALKSSVRKEMALKTTSPVYEEFLAVTTAQNGFSVDDFSVDDLLDLSNDDVFADEETDLKAQHEMVRVSSEEPNDDGDALRRSSDFSGCDDFGSLPTSELSLPADDLANLEWLSHFVEDSFTEYSGPNLTGTPTEKPAWLTGDRKHPVTAVTEETCFKSPVPAKARSKRNRNGLKVWSLGSSSSSGPSSSGSTSSSSSGPSSPWFSGAELLEPVVTSERPPFPKKHKKRSAESVFSGELQQLQPQRKCSHCGVQKTPQWRAGPMGAKTLCNACGVRYKSGRLLPEYRPACSPTFSSELHSNHHRKVIEMRRKKEPTSDNETGLNQLVQSPQAVPSF

SEQ ID NO: 3247 - protein, 206 aa, Platanus x acerifolia
EVALIVFSTRGKLFKYSTDSGMERILERYERYSYAERQHVVTDPQSQGSWSLEYTKLKAKIEILQRNQRHYMGEDLGSLRLKELQNLEQQLDSALKQIRTRKNQLIYDSLSEFQRKEKALQEENNLLSKKLKEKEKEKALAQRGHLEQQNHQGQNSPSFLLPQPLPSLNIGGTYQARGSECEEEGPRPHTRTNTPMPPWMLRHVNL

SEQ ID NO: 3248 - protein, 244 aa, Zea mays
MEADADADADEEMMACGGGGEKKRRLSSEQVRALERSFEVENKLEPERKARLARDLGLQPRQVAVWFQNRRARWKTKQLERDYSALRQSYDALRHDHDALRRDKDALLAEIKELKAKLGDDEDAAASFTSVKAEPAASDGPAPAGVGSSEISDSSAVLNDADPPVAEAPAPAPEVQGTLLVAPAGPVAGAAAANHGGVFFHGSFLKVEEDETGLLDDDGPCGGFFAVEQPPAMAWWNEPAEHWN

SEQ ID NO: 3249 - protein, 198 aa, Platanus x acerifolia
EVAVIVFSTKGKLFEYSTDSGMDRILERYEKSTFTERQLVATDPVSQGSWSLEYTKLQAKIESLQRRQRHYMGKDLESLSIKELQNTEQQLDIALKQIRTRKNQLMYDSMSELQRKEKALQEQNNLLLKKLEEKEKELGQQGHLEQCNQGQDSPSFLLSRPLTSLNIGGTYQMRGTGCDEGARTNTLIPPWMLSHVTE

SEQ ID NO: 3250 - protein, 204 aa, Sinofranchetia chinensis
EVALIIFSNKGKLSEYSTDSRMERILEQYERCTFAAEEFLTIDPESQGSLPLESRKLKARIEVLQKNQRNLMGEGLDSMSVKEIHNLEQQLDASLKQIRSRKNQLIYESISDLQRKEKALQEQNNQLGKNIKEKEKALTQQQTHWEQPNQGQNSPSFLLSQTLPSLNIGGPYQARSSREEYEGAQPQIRPNTLMPPWMLRHVNS

SEQ ID NO: 3251 - protein, 316 aa, Oryza sativa (indica cultivar-group)
MDANMLSAMMAAVGGDRAAAPGGDKPQPDTSEQINVSPLALLKMLKHGRAGVPMEVMGLMLGEFVDEYTVTVADVFAMPQSGTGVSVEAVDHAFQSEMLEMLRQTGRPEMVVGWYHSHPGFGCWLSGTDMATQQSFEQLHPRAVAVVIDPVQSVKGKVVMDAFRLVDHMAMVLGGAAGGEARQTTSNVGAVARPSAVALVHGLGRHYYSLAISYRMKEGEERMLACLSRSGWSDGFALRRFGAHDAGNEAAVRGMRDLAVGYGAQVREEDETPPERLAVVRAGKVDAKGKLEEKAMDAMSANIVQTLGMMLDTVTF

SEQ ID NO: 3252 - protein, 245 aa, Sinofranchetia chinensis
MGRGRVQLKRIENKINRQVTFSKRKTGLLKKAHEISVLCDADVALIVFSTKGKLYEYSTESGMDRILEKYERYSYAERELVATDSESQGNWPLEYTKLKAKIEVLQKNQRHFMGQELNSMSFKELQNLEQQLDTALKQIRSKRNQLMNESISELQKKEKALQEQNNQLGKKLKEKEKTLAQLAHWEHPNQGQNSPSFLLSQTLPSLNIGGPSQTRGSGCEEERTRRPETRPNTLLPPWMLRHINQ

SEQ ID NO: 3253 - protein, 2002 aa, Helicobacter pylori
MNEENDKLETSQKTQQHSPQDLSNEETTEANRFEDSSKESEESSDHLDNPTETKTNFDEYESEETQTQMDSGGNETSESSNGSLADKLFKKARKLVDNKRPFTQQKNLDEETQEPNEEDDQENNRYQEETQMDLIDDETSKKTQQHSPQDLSNEEATEANHFEDSSKESQESSEHHLDNPTETKTNFDEYESEETQTQMDSGGNETSESSNGSLADKLFKKARKLVDNKRPFTQQKNLDEETQEPNEEDDQENNRDQEETQMDLIDDETSKKTQQHSPQDLSNEEATEANHFEDSSKESQESSEHHLDNPTETKTNFDEYESEEITNDSNDQEIIKGSKKKYIIGGIVVAVLIVIILFSRSIFHYFIPLEDKSSRFSKDRNLYVNDEIQIRQEYNRLLKERNEKGNMIDKNLFFNDDPNRTLYNYLNIAEIEDKNPLRAFYECISNGGNYEECLKLIKDKKLQDQMKKTLEAYNDCIKNAKTEEERIKCLDLIKDENLKKSLLNQQKVQVALDCLKNAKTDEERNECLKLINDPEIREKFRKELGLQKELQEYKDCIKNAKTEAEKNECLKGLSKEAIERLKQQALDCLKNAKTDEERNECLKNIPQDLQKELLADMSVKAYKDCVSKARNEKEKKECEKLLTPEAKKKLEQQVLDCLKNAKTDEERKKCLKDLPKDLQSDILAKESLKAYKDCVSQAKTEAEKKECEKLLTPEAKKLLEEEAKESVKAYLDCVSQAKTEVEKKECEKLLTPEAKKKLEEAKKSVKAYLDCVSQAKTEAEKKECEKLLTPEAKKLLEQQALDCLKNAKTDEERKKCLKDLPKDLQKKVLAKESVKAYLDCVSRARNEKEKKECEKLLTPEAKKLLEEAKESLKAYKDCVSQAKTEAEKKECEKLLTPEAKKLLEEEAKESVKAYLDCVSQAKTEAEKKECEKLLTPEAKKKLEEAKKSVKAYLDCVSQAKTEAEKKECEKLLTPEAKKLLEQQALDCLKNAKTDEERKKCLKDLPKDLQKKVLAKESVKAYLDCVSRARNEKEKKECEKLLTPEAKKLLEEAKESLKAYKDCVSQAKTEAEKKECEKLLTPEAKKLLEEAKESLKAYKDCVSRARNEKEKKECEKLLTPEAKKLLEEAKESLKAYKDCVSRARNEKEKKECEKLLTPEAKKLLEEAKESLKAYKDCVSRARNEKEKKECEKLLTPEAKKLLEQQALDCLKNAKTEAEKKRCVKDLPKDLQKKVLAKESVKAYLDCVSKARNEKERKACEKLLTPEAKKLLEEAKESLKAYKDCLSQARNEEERRACEKLLTPEARKLLEQEVKKSVKAYLDCVSRARNEKEKQECEKLLTPEARKFLAKQALSCLEKAGNEEERKACLKNLPKDLQENVLAKESLKAYKDCLSQARNEEERRACEKLLTPEARKLLEQEVKKSVKAYLDCVSRARNEKEKQECEKLLTPEARKFLAKELQQKDKAIKDCLKNADPNDRVAIMKCLDGLSDEEKLKYLQEAREKAVLDCLKTARTDEEKRKCQNLYSDLIQEIQNKRTQNKQNQLSKTERLHQASECLDNLDDPTDQEAIEQCLEGLSDSERALILGIKRQADEVDLIYSDLRNRKTFDNMAAKGYPLLPMDFKNGGDIATINATNVDADKIASDNPIYASIEPDITKQYETEKTIKDKNLEAKLAKALGGNKKDDDKEKSKKSTAEARVESNKIDKDVAETAKNISEIALKNKKEKSGEFVDENGNPIDDKKKTETQDETSPVKQAFIGKSDPTFVLAQYTPIEITLTSKVDATLTGIVSGVVAKDVWNMNGTMILLDKGTKVYGNYQSVKGGTPIMTRLMIVFTKAITPDGVIIPLANAQAAGMLGEAGVDGYVNNHFMKRIGFAVIASVVNSFLQTAPIIALDKLIGLGKGRSERTPEFNYALGQAINGSMQSSAQMSNQILGQLMNIPPSFYKNEGDSIKILTMDDIDFSGVYDVKITNKSVVDEIIKQSTKTLSREHEEITTSPKGGN

SEQ ID NO: 3254 - protein, 186 aa, Oryza sativa (indica cultivar-group)
MEQLFVDDPAFASSMSSLEADIFSGAGQLPSSPWLDLDHLDDDVQDLSMAPTTANTVSSGYGSGGSGSHRKLSHNAYERDRRKQLNELYSSLRALLPDADHTKKLSIPTTVSRVLKYIPELQKQVENLERKKKELTATSTTNCKPGVLGNQMMSEGMAPIVSATCINDMEIMVQKMPYDDYLHSKI

SEQ ID NO: 3255 - protein, 410 aa, Picea abies
  misc_feature (118)..(118): Xaa can be any naturally occurring amino acid
  misc_feature (159)..(159): Xaa can be any naturally occurring amino acid
MSMPKLCDVCQVSNSVLYCRAHTAQLCLVCDVKIHGGSKASLCHERVWVCEVCEQAPAVVTCKADAAALCVSCDTDIHSANPLASRHERAPVIPFYECPNMPNNNTATNANNDNLDCXVLLNEDGGGDDPLKHDYVDDDYDDYDDDENDHNNLLNHQEXDNDAEICCAEEAATASWLIPEANRNNLTNINGGNSEGEDKMVKDKLKFKAYMQSIDFLQDVENYVDLEYLGTTTTITTPTTPTAHMGADSMVPVHTPEVIEHSSTKVSVETARSLDVDAASKCNYVYRTTSLNHCVSSSSIDVGIVPDSNTTTDISTPYHDPRGVFEIPPRVVHPGGHVEVMGREARVLRYREKRKNRRFEKTIRYASRKAYAETRPRIKGRFAKRTEVEVEQIYSSSLLPDQGYGVVPSY

SEQ ID NO: 3256 - protein, 242 aa, Pinus resinosa
MGRGRVELKRIENKINRQVTFSKRRNGLLKKAYELSVLCDAEVALIIFSSRGKLYEFGSAGMLKTLERYQKCSYVLQDATVSDREAQNWHQEVGKLKARVELLQRSQRHLLGEDLGPLSIKELQQLERQLEVALTHVRSRKTQVMLEMMDELRRKERILQEVNKSLRKKLQEAEGQAFNAMQPPPHAWDSHAVANNAYAMQHPSNAVDCEPTLQTGYQYAPPESSMPRHEQAQNNYMQGWMV

SEQ ID NO: 3257 - protein, 199 aa, Platanus occidentalis
GGITKKAQELSVLCDAEVSLIMFSSTGKFHEYISPTTTTKEIFDRYQQTLRINLWQAHYEKMQDSLNRLKEINNNLRREIRHRIGEDLNDLSIEELRGLEQNMDNSMKIVRDQKYHKIQTQTDTYKKKLKSSEETHRNLLRQFEGRDDDPDYGLVDNEGDYESEMGVANGGSHSFAFRLQPIQPNLQEGVYGFHDLRLA

SEQ ID NO: 3258 - protein, 235 aa, Zea mays
  misc_feature (184)..(184): Xaa can be any naturally occurring amino acid
MISGNLTNEDLGAGRTKAEGPTTAAGAVVAKSPVLPSSRHWPPSTESRIVRVSRVFGGKDRHSKVRTVKGLRDRRVRLSVPTAIQLYDLQDRLGLSQPSKVVDWLLDAAQHEIDKLPPLQFPPQAAQDLVAHLPPPSMVAPFAADRADGDKRHCHGGVKGLMGLNNSIRLVNATMPLAHGLYYXPLVFYSPEGGGFTMKEEATGYQFPVQNSLDHSQGQLSLSSARSFLRPGNQG

SEQ ID NO: 3259 - protein, 591 aa, Solanum dulcamara
MGTPKEEATDEVFSENLEQKPDPDPATSKSELKETTSKSISGELQKRLSQCDKGINMSQSNQEAISLSRVQENQSENVQKQLGLKSEADASGSSQLSSLPKDSDAKSRGSESSVKDKVVSVLSGMASDSSDQMQTSNMEVFVSQSDQQRVSYQIKREKALDKLQPRRNPDTSVHGLTSDQGMTLSKAPEKPSEDGYNWRKYGQKLVKGNEFTRSYYKCTYPNCLAKKQVERSHDGHITDIHYIGKHEHPETLSVPQMSPELVLPLQMIQQDIPIITALEAEGEKSTTPRETCEPSKPSEVPLALDVVSACGGVKVTPLKQHKLENEVDKDDVPDSKRQKKDIVATDYTPPVKSHSEPRHIVQTMSEVDIINDGQRWPKYGQKIVKGNPNPRSYYRCSVAGCPVKKHVERASHDPKLVITTYEGHHVHDFPTSKAIGQISAAPDTGTAGVREDSRIESGESKHVVESKSESGENKHIREPKTEAGGNKRVGESIPESGENKHIREPKTEAGENKHIGESRIESGGNKHVEKSKLELGGNKHVGESIPKPGGNKHVGESIPESGGNKHVGESIPESGENKHVGLDMAVHIGAN

SEQ ID NO: 3260 - protein, 589 aa, Oryza sativa (indica cultivar-group)
MSIVIVMSLCCFFYILGAWQKSGTGRGDSIALRVTKETDCTILPNLHFETHHSLGGVNPLVMTDKVFEPCHIRYSDYTPCQDQNRAMNFPRENMNYRERHCPTETEKLRCLIPAPKGYVTPFPWPKSRDYVPYANAPYKNLTVEKAVQNWVQFEGDVFRFPGGGTMFPNGANAYIDELASVIPFTDGTIRTALDTGCGVASWGAYLMDRNVLTMSFAPRDSHEAQVQFALERGVPAVIGVLGTIKLPYPSGSFDMAHCSRCLISWKSNDAMYMFEVDRVLRPGGYWILSGPPINWKTNHQAWKRSKEDLEAEQNVIEKIAEMLCWGKIHEKGDTVIWRKKADSNECHNKDDHPSKMCKIQDADDVWYKKMEGCITPFPEEAQLRKFPERLFAAPPRILQGRTPGVTEEIFEEDNKLWKKYVNTYKRINKLIGSLRYRNIMDMNAGLGSFAAIIDSPISWVMNVVPTISEKNTLGIIYERGLIGIYHDWCEAFSTYPRTYDLIHANGLFSLYQNKCNMEDILLEMDRILRPEGAVILRDNVEVLNKVRRTVMGMRWKSKLLDHEDGPHIPEKILVSVKKYWVGNEEENSS

SEQ ID NO: 3261 - protein, 311 aa, Vitis aestivalis
MAMDSSNWMAASLDLNANPLRLFDDTPKKEVQDDFTGLGLKVVSLKEEETGVLVEKLNQVNAENRKLTEMLTVMCENYNALRSHVMEYISKNPERESPSSRKRKAESSNNNSNNNGVVGNSESSSSDEDSFKKPREETIKAKISRVYTRTDASDTSLVVKDGYQWRKYGQKVTRDNPSPRAYFKCSFAPSCPVKKKVQRSVEDQSILVATYEGEHNHPHHGRIEPTSGANRSVNLGSVPCASSLSSSGPAITLDLTKPKSNSDAKASKSPELHHFLVEQMASSLTKDPSFKAALAAAISGRILHHNQTEKW

SEQ ID NO: 3262 - protein, 284 aa, Triticum aestivum
MDARQTAQVNQVVGAVGMPPPQSQTQDAWVDPQFVMMRGSTRDKIFEYIGRKQTSADWRRRLPELARRLEELLFRKYPSKAEYYNMMKQQIEPHLQFAIKQLSALNQQRQQNQQLSRQIASSPGNGTMILTPGITQGASETSRMSYVTGDIGPSSSGAGMVPLNANMGEAPDQHVNTLLSLGMNPTHQDHPRASSNNLMVDTVDTPATNRFLKSRAPLKEIRKEPKFSCPVCMNELVDASSTICGHIFCQKCIQASIQAQSKCPTCRRTLTMNSFHRVYLPTMD

SEQ ID NO: 3263 - protein, 267 aa, Helianthus annuus
MENSEAIEHEHDFSCIDRSMSFQNEDSGDISPQRRIGKGKIEIKRIENTTNRQVTFCKRRNGLLKKAYELSVLCDAEVALIVFSSRGRLYEYANNSVRGTIDRYKKSCLDPPSTGSVAEANAQFYQQEATKLRQQIANLQNQNRQFYRNIMGESLADMPGKELKNLESKLEKAINRIRAKKNELLFAEIEYMQKRELELHNSNQFLRARISENERAQQQHMSLMPGSSGYNDLGPHQSFDGLNDLQTNELQLNNNYSCQDQTPLQLV

SEQ ID NO: 3264 - protein, 247 aa, Helianthus annuus
MSFPNESGEMSPQRKLGRGKIEIKRIENTTNRQVTFCKRRNGLLKKAYELSVLCDAEVALIVFSSRGRLYEYANNSVKGTIDRYKKACLDPPSSGSVAEANAQFYQQEAAKLRQQIANLQNQNRQFYRNIMGESLGNMPAKDLKNLEGKLEKGISRIRSKKNELLFAEIEYMPKRENELHNNNQFLRAKIAENERSQQQHMSLMPGSSDYDLVPPHQPFDGRNYLQVNDLQPNNSYSCQDQTPLQLV

SEQ ID NO: 3265 - protein, 896 aa, Oryza sativa (japonica cultivar-group)
MAGDSRNEPMFCEEGSSESGYVLCVIDSLKKKITSDRFVYIQKRVEENSIKLSPITLHSHNLSKNRQTSTSNSTDLVSNLLTKRKEDALCAVNSRESSPDESEGANCQDECSSTVIVGGNLSARNSVRPIRLPEVATLPPYTTWIFLDRNQRMQEDQSVLGRRRIYYDTNCGEALICSDSEDEAVEDEEEKKEFKDSEDCIIRMTIQECGMSDAVLETLARDIERAPDDIKARYEILQGEKPEGSSKKVSELNVKMEDVYGDKDLDAALDSFDNLFCRRCLVFDCKLHGCSQDLVFPTEKQAPLCSSDEGTPCGIHCYKLVSKPDAIMEIDSHLLVDVEEPTSDNLKDQIGSNKKKLGSSGQKTKSQQSESSSTARVSSESSESEVQLLSNKSPQHSPGLSKNKLGAKGGIKKSTNRRIAERILMSVKKGQQEMSPDSNSIVNGCHWPRDMKLRSDTRSGIKDSVVSSQCNSPSTRSFRKKGTLQMENNSSFVDAQSDSMEDTNNEHSATDGCDSSRKEECVDESICRQEAHGRSWKVIEQGLLLKGLEIFGKNSCLIARNLLGGMKTCTDVFQYMNYIENSSASGALSGVDSLVKGYMKGNELRTRSRFVRRRGRVRRLKYTWKTAGYHFIRKRITERKDQPCRQYTPCGCQSACGKQCPCLTNGTCCEKYCGCPKMCKNRFRGCHCAKSQCRSRQCPCFAADRECDPDVCRNCWVGCGDGTLGVPNQRGDNYECRNMKLLLKQQQRVLLGRSDVSGWGAFLKNSVGKHEYLGEYTGELISHKEADKRGKIYDRENSSFLFNLNNEYVLDAYRMGDKLKFANHSPDPNCYAKVIMVAGDHRVGIFAKERISAGEELFYDYRYEPDRAPAWARKPEGPGAKDDAQPSTGRAKKLAH

SEQ ID NO: 3266 - protein, 269 aa, Zea mays
MEAGRMDQPFMAAINSQPFVEDIEPVKKASGDMPATTGSGCFECNICLDISAEPPLAFASEPVVTFCGHLYCWPCIYEWLRPGVESAASDNSSSARRQCPVCKATLSTDTLVPLYGRGGNSKKSLDGMAIPRRPMVHRETVEEQQNAQSNVNDQHYHQSMEDNSQRQPLLQAHHHPIPTGFDFIYPPAPVGRGLIHSTAGGVLGGMAEIVLPLALRGQMPASLYYTNPYHAATQNVNPRLRRHQMEIERSLHQIWFFLCVFVVLCLLLF

SEQ ID NO: 3267 - protein, 535 aa, Oryza sativa (japonica cultivar-group)
MSPPFHSFALHGVLGLDGYPLQGGGGGGGGYYYAEEQQPAAYLEECGNGHQFYMDEDFSSSSSSRQFHSGTGAPSSAPVPPPPSATTSSAGGHGLFEAADFSFPQVDISLDFGGSPAVPSSSGAGAGAGAAPSSSGRWAAQLLMECARAVAGRDSQRVQQLMWMLNELASPYGNVDQKLASYFLQGLFARLTTSRPAHAADARTASDRNASFDSTRRTALKFQELSPWTPFGHVAANGAILESFLEAAAAGAAASSSSSSSSSTPPTRLHILDLSNTFCTQWPTLLEALATRSSDDTPHLSITTVVPTAAPSAAAQRVMREIGQRLEKFARLMGVPFSFRAGGATAALAVNCVNALRGVARGRDAFVASLRRLEPRVVTVVEEEADLAAPEADASSEADTDAAFVKVFGEGLRFFSAYMDSLEESFPKTSNERLSLERAVGRAIVDLVSCPASQSAERRETAASWARRMRSAGFSPAAFSEDVADDVRSLLRRYKEGWSMRDAGGATDDAAGAAAAGAFLAWKEQPVVWASAWKP

SEQ ID NO: 3268 - protein, 246 aa, Oryza sativa
MGRGKVQLKRIENTINRQVTFSKRRSGLLKKANEISVLCDAEVALIIFSTKGKLYKYATDSCMDKILERYERYSYAEKVLISAESDTQGNWCHEYRKLKAKVETIQKCQKHLMGEDLESLNLKELQQLEQQLENSLKHIRSRKSQLMLESINELQRKEKSLQEENKVLQKELVEKQKVQKQQVQWDQTQPQTSSSSSSFMMREALPTTNISNYPAAAGERIEDVAAGQPQHVRIGLPPWMLSHING

SEQ ID NO: 3269 - protein, 274 aa, Solanum lycopersicum
MGRQPCCDKVGLKKGPWTAEEDKKLINFILNNGQCCWRAVPKLAGLLRCGKSCRLRWTNYLRPDLKRGLLSEYEEKMVIDLHAQLGNRWSKIASHLPGRTDNEIKNHWNTHIKKKLKKMGIDPITHKPLSTITIDHTNTLEQENQPIEEEKNQDILLAQMDIESSSIDQSTVAKIKSEDDNNNSNNNTMATNCTNNFDSTIVEVNNNGFCIDEVPLIEPHEILVQESTPSTSSSSFSSSSSSNILEDLKFLSSFDEWPLMENNNNNNVGIWMGN

SEQ ID NO: 3270 - protein, 495 aa, Triticum aestivum
  misc_feature (463)..(463): Xaa can be any naturally occurring amino acid
MGAMAEEAEHEGCVENRQPLAASSESVSEGSSYGGAGGPARMSPPVSGSVNSISGLRRTSGPIRRAKGGWTSQEDETLRKAVETFNGRSWKKIAEFFPDRTEVQCLHRWQKVLNPELIKGPWTQEEDDKIIDLVKKYGPTKWSVIARSLPGRIGKQCRERWHNHLNPDIRKDAWTAEEEQALINAHREYGNKWAEIAKVLPGRTDNSIKNHWNSSLRKKLDVYGTRNILAIPRLVGHDDFKDKQKPVASEGHLDLNTVPGITSKNLPEIAHHSNFSSHLQSYKLDHAKAGSGFLSISFLPTVQPLTSSEVSSVVNGSAVTLAAQGLESDSVRDKALEIVSVHEKGLKVDSTLDTLREPGSTQLEAVPAKGEESSLKNDAQSSLGPLCYQIPNMNDVAPASSSLFSEHQTVHQTSEHCRNGALSPNGCTTPTKGTMSVQLSVDSILKIAADSFPVTPSILRRRXRERPTPASDLKFGEPNTDSFYTPAGKRPTTDT

SEQ ID NO: 3271 - protein, 337 aa, Saccharomyces cerevisiae
MKNDNKLQKEALMRLSQLRFPFADAPSIVQAHQKDEQIQGLLIMKVTELCKLIKSQLFVNSYPKELSIFAKLLYLLFTTGRRGRTLGEEYVDLTYTNRKGTRLAGRLKMIVFAFAYPLCPYFITKLYKKIMKNNKESKIEDTESVAAFCKGLLDFILDVHMTLFYFKGAFYSISKRIFGMRYAFKHILSKNEANFREEGSQKYKVLGYILLAQNVMKWYPVLTSTLGSWIYGRKRTNDSITRSSVGLQERSEHESIEGIPKESQLTHINLSDKNQLPFIPEASRKCILCLMNMSDPSCAPCGHLFCWSCLMSWCKERPECPLCRQHCQPQEILVLRQ

SEQ ID NO: 3272 - protein, 278 aa, Vitis aestivalis
MGEEASSLQLIHHLLLSDFDSMETFVSHVSHSLRSSASDSSVSTDDIIQVSEYPKLHEDESNAFLFDYSTSSPSAVFQFQTESPKPSRLSHRRPPVSISLPPPPISHTSSSLDSGERRHYRGVRRRPWGKFAAEIRDPNRRGSRVWLGTFETAIEAARAYDRAAFKMRGSKAVLNFPLEAGNWSDSDPPATSIRKRERESESEEREQPEIKVLKQEEASPDSDSPVVAEAANVLEASPLTPSSWRTVWEERDMDGAFHMPPLTPLSPHPWIGYSRLIS

SEQ ID NO: 3273 - protein, 228 aa, Brassica napus
MDQQEHAQSGAMNYGSNPYQTNPMTTTSAGPAAPPGQLGFHQIHQQQQQQQLAQQLQVFWENQFKEIEKTTDFKNHSLPLARIKKIMKADEDVRMISAEAPVVFARACEMFILELTLRSWNHTEENKRRTLQKNDIAAAVTRTDIFDFLVDIVPREDLRDEVLGSIPRGTVPEAAAAGYPYGYLPAGTAPIGNPGMVMGNPGGAYPPNPYMGQPMWQQQGPDQPDQEN

SEQ ID NO: 3274 - protein, 341 aa, Vitis aestivalis
MATAVEVSALQLIRQHLLGELSPKNIVVTDLTVGEEWSNGLNSEVSTSQSDSSFCFQAASCDSPVTISELFGSTDLSADFFGFVPSSTSEQSQSNFFEFETKPQIIDLTSPKGLNSSHFFEFETKPQIKDTTKTKSLDSSSQSTGKDRKPSLKISVPRPTKEIEWLEFAEPKQAATVEPAQNISHPEEKKHYRGVRQRPWGKFAAEIRDPKRRGSRVWLGTYETAIEAAKAYDRAAFQMRGSKAILNFPLEAGKSAETSTDYGRKRCREAEPEVTEMEANPPAKKEKLPEANTITRVQNDTPLTPSFWDFDLDSVGCLINVPPISPLSPHPKFGFPQLMVI

SEQ ID NO: 3275 - protein, 546 aa, Candida glabrata CBS 138
MTEEEVNFIYDDDEDEDDTMIMYENNGGVGINSTQDDLVSISKSKSLVSQSSEFDIDEDYSGDDLEYDELLSVPITHENKKSLNNGSVPNLQYECLTTQDIFQKMLNRVHHIQPILAIPTEDILTLLQHFDWNEERLLEAWTDRMDELLLEVGIHMDENKSSKCREIILKEDFLCLICCESKSTETFSMECGHEYCVDCYRHYIKDKLHGGSVITCMNCSLALRHDDIDRIMGNDFSAKLMESSIKSFVQKHNRNYKWCPFADCKCIIYLKDMSSLPEYTRLHYSPFVLCTSDHRFCFNCGFEVHAPGDCKITNAWVRKAKKESENLNWVLSHTKECPECSVNIEKSGGCNHMVCSSCKYEFCWICEKAWAPHGKNFFQCTMYKNDDSRNKSTDENAKNLKKYTFYYRVFNEHEVSAKLDWRLGQTIGHKVRDLQEKIGISWIEGQFLTEALKTLSEGRTALKWSFALAYYADPSHNLTKIFVDNQGLLSKAVEDLSELLQIKNADSIMKKKLDFYNKAGYVENRTLALLQCGRDLLCKGICKVTE

SEQ ID NO: 3276 - protein, 274 aa, Zea mays
  misc_feature (44)..(44): Xaa can be any naturally occurring amino acid
RGGDAVAERQGGRGGGGGGPGRHDERLQRPRGRGGGGGAAAAGXDGQGRAKRKRSRRRRDRDGQQPKEPTTQEEYLALCLVMLATGRRDADADAAAPPQDHACSVCGKAFPSYQALGGHKASHRAKPSPSPSPAAALAPEPGAGDGDRHDEKKPAQPSSSSAGSRPAAAAHECNVCGKAFPTGQALGGHKRRHYDGTIGSAAAPARASSSSVPASAATSSLGAATSVPASAPPPPQAVAFDLNLPALPERCAGVDEDEVLSPLAFKKPRFMIPA

SEQ ID NO: 3277 - protein, 97 aa, Arabidopsis thaliana
MASNSRSSISPWTFSQNKMFERALAVYDKDTPDRWHNVAKAVGGKTVEEVKRHYDILVEDLINIETGRVPLPNYKTFESNSRSINDFDTRKMKNLKI

SEQ ID NO: 3278 - protein, 271 aa, Glycine max
MDKSEQTQQQQQQHQHGMGVATGASQMAYSSHYPTAPMVASGTPAVAVPSPTQAPAAFSSSAHQLAYQQAQHFHHQQQQHQQQQLQMFWSNQMQEIEQTIDFKNHSLPLARIKKIMKADEDVRMISAEAPVIFAKACEMFILELTLRSWIHTEENKRRTLQKNDIAAAISRNDVFDFLVDIIPRDELKEEGLGITKATIPLVNSPADMPYYYVPPQHPVVGPPGMIMGKPVGAEQATLYSTQQPRPPMAFMPWPHTQPQQQQPPQHQQTDS

SEQ ID NO: 3279 - protein, 302 aa, Triticum aestivum
MDTDLDLDALLASFAGESAAVSELLAPPPLDAAEAGSPESVTSRSSHAGEEVLSEIERFLMQEDEAAGAEPVDGISVDEFFDALFDGGEEGGEKGNGSEAEAGGSTDGDSRREEEGVEVVTPETEAEVVTPETEVDGDDPISKKKRRQMRNRDSAMKSRERKKSYVKDLETKSKYLEAECRRLSYALQCCAAENMALRQNMLKDRPIGAHTAMQESAVLSETLPLVSLLWLVSIVCLFLTPGLPNRSLAAPRRAERGLAMVAGKPSSDQPETLELLPHGRRWRGTRERIKLDAPPLRAAAAC

SEQ ID NO: 3280 - protein, 328 aa, Brassica napus
METIGGFHKEDDEQMDLPPGFRFHPTDEEIITHYLHKKVLDKDFSAKAIGEVDLNKAEPRELPYKAKTGEKEWYFFCARDRKYPTGLRTNRATQAGYWKATGKDKEIFRGKSLVGMKKTLVFYKGRAPKGLKTNWVMHEYRLDGKLSAHNLPNTAKNEWVICRVFQKSAGGKKIPLSALIRIGSYGGDFSPSLMPSLTDASPFTDKTKTEPVYVPCFSNQTDQAQGNPLNCFSSPDIFHRIPLYQTQSLQVSGNLQSPILGQEHSVLHAMIDNNRRQSLKGMSVSQETAVSTHMHTDISSDFEYGKRRAQEDPSSSAGPVDLDPFWNY

SEQ ID NO: 3281 - protein, 210 aa, Helianthus annuus
MGRGRIEIQKIENNTNRQVTYSKRRNGIFKKAHELTVLCDAKVSLIMFSNTGKFHEYISPSTTTKKIYDMYQTTLGFDLWSSHYERMQETLKKLKDSNNKLRREIRQRVLGEDLDGLDMNDLTILEQHMQDSLTVVRERKVKNLEQRNCNLRLDYDTIHQLEKKYGMVENEVGYESTIAYSNLYGFCENPNNNIIHGSGSGYEPHGLRLD

SEQ ID NO: 3282 - protein, 280 aa, Arabidopsis thaliana
MSPPSTIAYVLPPGFKFVPNDEEVIHCYLKPYSDGNTNVLLHVPIHLVNIYESNPQTLSEEFQKGNDKEWFIITERNKVDQGLSQTKRVGYGAKRQKRVDTNGGYWHATVAAQKINAGDGVVRNKRPLAYYVGKPSEGVKTDWLMQEYSLDHSSHNNDKDYTLCKIYLTPQATKMNKEVGEEKKKQKKGEAVVSVAPVEALEEQLPCNVEYHQPLAPLDSCQPQPHDLAYQQQQFCPGPLDSYQPQPHDMENQQPHNEKLKKEEDVEQLDLHQPDQGKGC

SEQ ID NO: 3283 - protein, 251 aa, Helianthus annuus
MGRGKVQLRRIENKINRQVTFSKRRGGLLKKAHEISVLCDAEVALIVFSNKGKLFEFSTDSCMESILERYERYCYSERQLVATDATPRSWTLEYNKLKSRAELLQRNHRHYMGEDIESLSLKEIQNLEQQLDTGLKNIRARKNQLLHESINELQKKGKAIQEQNTTLTKQLKEKEKDKTIPQNTQWEQHNYVDHDTTFFLPQPHPALNIGGDYNQATTSAASGGEGADGRTSQLDLSLQPIYSHHLRCFPS

SEQ ID NO: 3284 - protein, 349 aa, Zea mays
MKPMATNGMAPSFFAANFLLQMQQEQQAHHQHQHHEGHDHLLAPPPPALVSPFLHDFGGAMTAPPPPMLATGIKRMYPDGMCDDGSGHLHAEPKQHQQDCGGGASDDEEGSAAAACGERKRRLSVEQVRTLERSFEVANKLEPERKAQLARALGLQPRQVAIWFQNRRARWKTKQLEKDYDALRRQLDAARAENDALLSHNKKLQTEIMALKGGGGGRQEAASELINLNVKETEASCSNRSSDENSSEINLDISRAPASEAPLDPTPPPGAGGGGMIPFYPPSVGGRPASAAGVDIDQLLHTSAPKLEQHGSGGAVVVQAAETASFGNLLCGVDEPPPFWPWADHQHFH

SEQ ID NO: 3285 - protein, 495 aa, Arabidopsis thaliana
MENSDTDSEVFFWFQNQNQNHSHKFPSSCFPPSSHSAFYGSSSMINTETATMDEEDVCESYMMREITKKRKLTPIQLRLLEESFEEEKRLEPDRKLWLAEKLGLQPSQVAVWFQNRRARYKTKQLEHDCDSLKASYAKLKTDWDILFVQNQTLKSKVQFLNRLTSHYFQESVQNFDDTFKQVDLLKEKLKMQENLETQSIERKRLGEEGSSVKSDNTQYSEEEGLENQYSFPELAVLGFYYDPTLTASNLRQEPLKVTCADQMTQIQISDVTEPASSAHKKIEVTQRSSSMSRKRDKPYTNRHTPARISKRRRPWAPSSSEHDEIIDKPITKPPPPPALVVMGLPANCSVLELKSRFEIYGSISRIRIHKDGIGSVSYRTAESAEAAIAGSHEPSFGISIDSKKLEVVWATDPLVKWKEGVTAGEGKERTSSFSSKLLRPVMPLRKHGRSSRLASAIVNPRSDNTKGISGDGGISSPATTSEVKQRNIVTYDDIV

SEQ ID NO: 3286 - protein, 319 aa, Oryza sativa
  misc_feature (310)..(310): Xaa can be any naturally occurring amino acid
MTARSMLRNHPEASVLDTIRQHLLEEPRGGGGGEAAEASFGSLVADMWSDSLPFRDDDADDMVVFGAMRDAFSCGWLPDGVFAEVKPEPLLSPDSSSYDGSSCCFGFADVSEPVTPSDAASGAAEAAAAAAAATAEHGKEEEAAAAVARGKHYRGVRQRPWGKFAAEIRDPAKNGARVWLGTFDTAEDAALAYDRAAYRMRGSRALLNFPLRIGSEIAAAAAAAAAAAAGDKRPSPEPATSESSFSSSSSCTTTTTSSSTSSSGSPKRRKRGEAAAASMSMPLVPPPSQVDWPGQAWDPAAAPVEQVAIXTPRVEQLVI

SEQ ID NO: 3287 - protein, 249 aa, Oryza sativa (japonica cultivar-group)
MGRGPVQLRRIENKINRQVTFSKRRNGLLKKAHEISVLCDADVALIVFSTKGKLYEFSSHSSMEGILERYQRYSFDERAVLEPNTEDQENWGDEYGILKSKLDALQKSQRQLLGEQLDTLTIKELQQLEHQLEYSLKHIRSKKNQLLFESISELQKKEKSLKNQNNVLQKLMETEKEKNNAIINTNREEQNGATPSTSSPTPVTAPDPIPTTNNSQSQPRGSGESEAQPSPAQAGNSKLPPWMLRTSHT

SEQ ID NO: 3288 - protein, 167 aa, Glycine max
MDSSSHQLLPFNENDPEDMLLYGIITSCQEKKVTINQEQVNKKRSSFRGVRRRPWGKFAAEIRDSTRHGVRVWLGTFDNAEAAALAYDQAAFSMRGSGAVLNFPVEKVKESLRDMKLDGCSPVVALKRRHSLAAKRKKEDVLVFHDLGADYLEHLLMCSDLPSTTIV

SEQ ID NO: 3289 - protein, 241 aa, Glycine max
MVALFSPPVFSTKGWLLEEDPLSYDVSSEYSFPYQFYSPQTQIELEIERSTSPSPEDPAMVKKLSHNASERDRRKKVNHLVSSLRSLLPGPDQTKKMSIPATVSRVLKYIPELQHQVQALTKKKEELLCRISKNLKGDSVNKESQRRISHHNSDFAVSTSRLNDCEAVVHISSYEAHKAPLSDILQCLENNGLYLLNASSSETFGGARGYNLHFQVEKTHRLESEILTEKLLSIYEKQRIF

SEQ ID NO: 3290 - protein, 1271 aa, Coccidioides immitis RS
MSRAPAGFADFFPTAPSVLQKKRSKAAQDRHAANTPKAADPLPNLGLSSTPDIKGGVGTSADNPVRAVGERSAETTLALGDTNGATSSSSLSTGSSGFFSASAPPGVAKPNGISSCALTPLTNTDSSPPCKIESPLGSKSGSTDAAPQLAPTCEAHGGPEPVTITPLHTPPTPRVQARPANSEVKGHKITYDPDLDRKFPSKARRRKPQYETFGVDDEKDPPPCDPRMAIANYTRGAACKQKTKYRPTPYILRPWAYDPTTSVGPGPPTQIVVTGFDPLTPIAAISALFSSFGDIGEINNRTDPMTGRFLGVCSIKYKDSRAFRGGISLSASQAVRRAYLECKKEQRIGTRRIRVELDRNGVVSGRMVAKLITAQKAEFPSLEESRKESVGDNDNRLPIGDGAKKDNEQSKDNLPPSTAPKGPSGRSSLHPSLLAPDGPRAVLKSPVPSRIEETPILQQIKRDPYIFIAHCYVPVLSTTVPHLERRLKLYDWKAVRCDKTGYYIIFENSRRGELEAERCYRMCHMTALFTYVMNMECQPYGNPNYERSPSPERIKAEKREKAKRERLHREMELDIEEEKRLRVENLDPAREALSVLIIELRDKLLDDVKSRVAAPALYDFLEPDRHNAKRQQLGIPAPEGTGRPSFRIDASTDGTVVHSQPDAYSRHHRPGGVSSLNVLALPRIRKVKGFEQGNAVYIDERRRAKPRKREFRPLYHRLQQLHEIEDSDDDQQVSFARDTEEVESRPLSRLSSESAESDNEDDLMRKSPSLLDAKPLDVPLPESESLAGGIEQSGLPDREKSIIEELERGINTLPTSSKKRKRLIEELATRKKRKEVDNLFELDAKPLESLVEETAQEALPADSTDALRTVTPVLKDKKRKVKGQSGKQIFEERQAPKRKEIDSTQPLLFEESVELLPEGEIEISEPAIEELKPEVEWGVSTDEPRPTAEDDDTIVLDLDGWQSLIKDDEDINFLKKALSEHLAADIGNLAAWTWKHKEIKAINRGGDRGPVHSETRIDGYYVPNPSGSARTEGRKRIRESEKSKYLPHRIKVQKAREERLAKAKNDPHAAAAEAARLLAAKSLSKSTSRSTRVNNRRLIADINAQKQALPMQNGDSDVLRFNQLKKRKKPVRFARSAIHNWGLYAEENISANDMIIEYVGEKVRQQVADMRERRYLKSGIGSSYLFRIDENTVIDATKRGGIARFINHSCTPNCTAKIIKVDGSKRIVIYALRDIDRDEELTYDYKFEREWDSDDRIPCLCGSAGCKGFLN

SEQ ID NO: 3291 - protein, 636 aa, Arabidopsis thaliana
MPTLYKKAGCHLQMTTMGKGRAPCCDKNKVKRGPWSPQEDLTLITFIQKHGHQNWRSLPKLAGLLRCGKSCRLRWINYLRPDVKRGNFSKKEEDAIIHYHQTLGNKWSKIASFLPGRTDNEIKNVWNTHLKKRLTPSSSSSSLSSTHDQSTKADHDKNCDGAQEEIHSGLNESQNSATSSHHQGECMHTKPELHEVNGLNEIQFLLDHDDFDDITSEFLQDNDILFPLDSLLHNHQTHISTQEMTREVTKSQSFDHPQPDIPCGFEDTNEESDLRRQLVESTTPNNEYDEWFNFIDNQTYFDDFNFVGESSMILVRFSARFTQTTLLFSFSITLMAALRVSVFRGQNRSQVDGWQWQHRLLPVCRDQAPHQASSPEIELGVCGRYAPPETLDKKLTRPKPIYLRVSRDLTLTDFGSKSLNFGLTVNLQFYINRDSLAMEQSEEGQQQQQQGVMDYVPPHAYQSGPVNAASHMAFQQAHHFHHHHQQQQQQQLQMFWANQMQEIEHTTDFKNHTLPLARIKKIMKADEDVRMISAEAPVIFAKACEMFILELTLRAWIHTEENKRRTLQKNDIAAAISRTDVFDFLVDIIPRDELKEEGLGVTKGTIPSVVGSPPYYYLQQQGMMQHWPQEQHPDES

SEQ ID NO: 3292 - protein, 575 aa, Brassica napus
MKRDLHQFQGPNHGTSIAGSSTSSPAVFGKDKMMMVKEEEDDELLGVLGYKVRSSEMAEVALKLEQLETMMGNAQEDGLAHLATDTVHYNPAELYSWLDNMLTELNPPAATTGSNALNPEINNNNNNSFFTGGGDYDLKAIPGNAVCRRSNQFAFAVDSSSNKRLKPSSSPDSMVTSPSPAGVIGTTVTTVTESTRPLILVDSQDNGVRLVHALMACAEAVQSSNLTLAEALVKQIGFLAVSQAGAMRKVATYFAEALARRIYRLSPPQTQIDHSLSDTLQMHFYETCPYLKFAHFTANQAILEAFEGKKRVHVIDFSMNQGLQWPALMQALALREGGPPSFRLTGIGPPAADNSDHLHEVGCKLAQLAEAIHVEFEYRGFVANSLADLDASMLELRPSETEAVAVNSVFELHKLLGRTGGIEKVFGVVKQIKPVIFTVVEQESNHNGPVFLDRFTESLHYYSTLFDSLEGAPSSQDKVMSEVYLGKQICNLVACEGPDRVERHETLSQWSNRFGSSGFAPAHLGSNAFKQASTLLALFNGGEGYRVEENNGCLMLSWHTRPLITTSAWKLSAVH

SEQ ID NO: 3293 - protein, 207 aa, Triticum aestivum
  misc_feature (10)..(10): Xaa can be any naturally occurring amino acid
  misc_feature (16)..(16): Xaa can be any naturally occurring amino acid
  misc_feature (30)..(30): Xaa can be any naturally occurring amino acid
RLFMRFLSKXEHEALXRSVIEERKIRRRIXQELQECRSAGCRTLAEAKIHIEQKRRKEYEANALKAKESGQLISNSKSGHKTNRPMKLETDGSLDLKKGSAILDAGGRDSPKTTGPTSAKQWDDWDIVGLPGAELLSSSEKLLCCQNRLLPSHYLRMQEVLMQEMFKGNVVKKEDAHVLFKVDPAKVDTVYDMVMKKLGNNEEAPMV

SEQ ID NO: 3294 - protein, 273 aa, Zea mays
MGRGKVQLKRIENKINRQVTFSKRRNGLLKKAHEISVLCDAEVAVIVFSPKGKLYEYATDSRMDKILERYERYSYAEKALISAESESEGNWCHEYRKLKAKIETIQKCHKHLMGEDLESLNPKELQQLEQQLDSSLKHIRSRKSHLMAESISELQKKERSLQEENKALQKELAERQKAVASRQQQQQQQVQWDQQTHAQAQTSSSSSSFMMRQDQQGLPPPHNICFPPLTMGDRGEELAAAAAAQQQQPLPGQAQPQLRIAGLPPWMLSHLNA

SEQ ID NO: 3295 - protein, 536 aa, Vitis vinifera
MAENDETSLSSSASASASRASAPLRPTITLPPRSSMETLFPGGPGFSPGPMTLVSNFFSDNDPDSYCRSFSQLLAGAMASPAAVPGPRPSFSTDPQVSASSKEDRTSVDAAGDFEFRFKQNRPSGLVIAQSPLFTVPPGLSPTCLLDSPGFFSQGPFVMSHQQALAQVTAQAAQAHSHMQLQAEFPSSLSVSPAASLTQFPSFASNTKAHEQMPPLVSDARTAVKESSGLSQSDQRSQPSSFTVDKPADDGYNWRKYGQKQVKGSEYPRSYYKCTHPSCPVKKKVERSLDGQVTEIIYKGQHNHQAPLPNKRAKDTGNPNGNSNFQENPELASQNQTGNLNKPKEGLPAYSLSKKDQQSSQAIPEHLPGSSDSEEMDDAETRGDEKGEDEPDPKRRNTEVRVSDQVSSHRTVTEPRIIVQTTSEVDLLDDGYRWRKYGQKVVKGNPYPRSYYKCTNPGCNVRKHVERAATDPKAVITTYEGKHNHDVPAAKSSSHNTANSIASQKPQNVVDKKRAFIDNNDQCPIGRLQLKEEQIT

SEQ ID NO: 3296 - protein, 445 aa, Arabidopsis thaliana
MRTDQVMLSNKNTNTCCVVSSSSSDPFLSSSENGVTTTNTSTQKRKRRPAGTPDPDAEVVSLSPRTLLESDRYICEICNQGFQRDQNLQMHRRRHKVPWKLLKRDNNIEVKKRVYVCPEPTCLHHNPCHALGDLVGIKKHFRRKHSNHKQWVCERCSKGYAVQSDYKAHLKTCGTRGHSCDCGRVFSRVESFIEHQDNCSARRVHREPPRPPQTAVTVPACSSRTASTVSTPSSETNYGGTVAVTTPQPLEGRPIHQRISSSILTNSSNNLNLELQLLPLSSNQNPNQENQQQKVKEPSHHHNHNHDTTNLNLSIAPSSSYQHYNNFDRIKEIMASEQIMKIAMKEKAYAEEAKREAKRQREIAENEFANAKKIRQKAQAELERAKFLKEQSMKKISSTIMQVTCQTCKGQFQAVAVPAATADETSLVVSYMSSANTDGELENGF

SEQ ID NO: 3297 - protein, 170 aa, Capsicum annuum
MENYPPLFPSSLSSHEFSLMNKKRSNTHAKEVLLFQGKNNGFLGLMASMETPSGVTNSFEDDVMKSCKKKGEKKIKKPRYAFQTRSQVDILDDGYRWRKYGQKAVKNNKFPRSYYRCTHQGCNVKKQVQRLSKDEGVVVTTYEGMHSHPIDKSTDNFEQILSQMQVYASF

SEQ ID NO: 3298 - protein, 220 aa, Oryza sativa (japonica cultivar-group)
MTAALQALLDPTALSLGLPTPAINKEEYLAICLAALACTRAGKALVGVGGQQQVQACNKWLCPAPAAPEELRFRCTVCGKAFASYQALGGHKSSHRKPPFPGDHYGAAAAAQQLASAGDSKEDSASSAAGSTGPHRCTICRRSFATGQALGGHKRCHYWDGTSVSVSVSASASAASSAVRNFDLNLMPLPESTAAAGIKRWAEEEEVQSPLPVKKLRMSN

SEQ ID NO: 3299 - protein, 407 aa, Oryza sativa
AMSFRSVIQEVKGEIGAISRRGFRSRPGRVRRVAAAAEEPPDESSAAALVMRESCWTQLPPELLREVLARVEESEGWWPRRRDVVACAGVCRSWRGIVREIVRTPEASGNLTFPISLKQPGPRDAPMKCFIVRNRTTQTYYLYIGLTDALTDDGKFLLAARKCRRTTCTEYLISLDMNDISKRTDSYVGKLRSNFLGTKFTIYDAHPPYAGDVISKGQSARVIGSNHLSPRIPAGNYPVSHISYELNVLGSRGPRRMHCAMDSIPVSAIEQGGTAPTQTEFPLSYHESFTSIPFFKSKSVRANNSTASLLTQNGSKLVLKNKSPRWHEHLQCWCLNFHGRVTVASVKNFQLVASDESNPTNQEHDDVILQFGKVGKDMFTMDYRYPISAFQAFAICLSSFDTKIACE

SEQ ID NO: 3300 - protein, 294 aa, Arabidopsis thaliana
MPTLYKKAGLDNFNVVANEDNQVNDVKPPPPPPRVCARCDSDNTKFCYYNNYSEFQPRYFCKNCRRYWTHGGALRNVPIGGSSRAKRTRINQPSVAQMVSVGIQPGSHKPFFNVQENNDFVGSFGASSSSFVAAVGNRFSSLSHIHGGMVTNVHPTQTFRPNHRLAFHNGSFEQDYYDVGSDNLLVNQQVGGYVDNHNGYHMNQVDQYNWNQSFNNAMNMNYNNASTSGRMHPSHLEKGGPNPAFLYKVGIIRKHCLSICCNEQVTISQNKIIICHPAAALARVSKSLMLHCTR

SEQ ID NO: 3301 - protein, 246 aa, Helianthus annuus
SYMSSCPFKKNEIFFANKTIYEAALSSSTLHIVDFGIAYGFQWPILIKHLGDRPGGPPKLRITGIEFPQPGFRPAEWVEETGRRLATYCERFKVPFEYNAIAIQNWEMINIDDLKLQRNEFLAVNALARFENLLDETMVTGSSPRDAVLKLVRDMKPDIFVHSIVNGSYSAPFFVTRFREALFHYSALFDMLDATIERENEQRQSYEGEFHGRQVMNVIACEGPQRVERPETYKQWQVRITRAGSN

SEQ ID NO: 3302 - protein, 475 aa, Zea mays
MAMGGAFPFQWPEGPADPVLDDVTLPPLPTAAPDAGVAAYYADAADVHAMHMALPDFAAALAAMRREEEEAAGIRLVHLLMSCAGAVEAADHAGASAHLADAHAALAAVSPTSGIGRVAVHFTAALSRRLFPPTPSPSPSPPPPAPHAADADRAFLYHRFYEAGPYLKFAHFTANQAILEAVQGCKHVHIIDFSIMQGLQWPALIQALALRPGGPPSLRLTGIGPPSPPGRDDLRDVGVRLADLARSVRVHFSFRGVAANRLDEVRPWMLQVSQGEAVAVNSVLQLHRLLADAPSSGDARAPIDAVLECVASVRPRVFTVVEQEADHNKPGFLDRFTEALFYYSAVFDSLDAASGGAGDAAAEAYLEREICDIVCGEGAGRRERHEPLWRWRDRLGRTGLAAVPLGANALRQARMLVGLFSGEGHCVEEAEGCLTLGWHGRPLFSASAWRAEENNQSDSRSRSSGSEESNISCSS

SEQ ID NO: 3303 - protein, 278 aa, Glycine max
MLEGLDEEGCVEEAGHHSEKKRRLNVDQVKALEKNFEVENKLEPDRKVKLAQELGLQPRQVAVWFQNRRARWKTKQLERDYGVLKANYGSLKLNFDTLQQDNEALLKQIKELKSRLVQEENNNNTESDVSVKEEMIATLQDSNPLCESAIPGSDSKELSYECFNKSDEVGGGSVFPVDFKDGSSDSDSSAILNEENNNHSPNNNAAISSCGVLQSHGLLSSPSSSSMNNCFQFQKQYQTTTQYVKMEEHNFLSADEACNFFSDEQAPTLQWYCSEEWS

SEQ ID NO: 3304 - protein, 148 aa, Oryza sativa (japonica cultivar-group)
AAGAPGKPPRADKVSILSDAARLLSQLRAEAQKLKSSNESLQDSIKSLKAEKSELRDEKTRLKAERERLEQMLKGVGAATPAAPAPFVPHHAAAVAAAPAYHPAAFAQAGGKYVPYATSYAPPAAFWQWIPPTSLDTSKDPVMWPPVA

SEQ ID NO: 3305 - protein, 281 aa, Zea mays
  misc_feature (27)..(27): Xaa can be any naturally occurring amino acid
MEGNAAAGKRSRTETANGAAGGGKRSXSTIGCPFGEGCRFLHFVPGGYPAVAKMLNLGSPAVSAPSRTHVDHAALTGASHSASSGKTRMCTKYNTTEGCRFGDKCHFAHSERELGKPAYMPYGEPPMGGRFGGRPEPVQPAAMGPPAGNFGASATAKISVDASLAGGIIGKGGVNTKQISRVTGVKLCIRDPESSPNLKNIELEGNFDQIKQAIDLVRDLIATISASMPAKNPSSAVAPAGGGRGSGPGGTSSNYNTKLCENFLKLCENFQRLCMRYCLLL

SEQ ID NO: 3306 - protein, 872 aa, Cryptococcus neoformans var. neoformans B-3501A
MRPPTVSHSDILHTAGTTKHKQRNPDNSNDSGSDASIQALEHPPVVRGRKDAPIIIDDSDSEQDARRPAKRVRREDAHPTIPRPSARQAPPPHRNVSSHAQAHRVHGSPSTAGPSEVFSAERPAQPVAGPPKRRLADQPEQPVAGPSRLYASTTVLSPPSIRRTKSHDGKVHESPAKTPRDKRAKRAGSRAPVLSETVPSAHTPRSFSGPSQYAAPASSPAPHGLPPVEYLDDEEELLAPPNHTPAPTSFPAAPVVLPPLDPAHSDVILRNVLEILPDLEPEWASAEIAKYHASGHTDRLAEAIVDRALELKGGYPKMIEKAKEKKKEEKPDDGYKLNTYRHAQRSGPQYYALATQYLEAEFSLIPTTYIRSTFVKTCGSLFTPAYYRLLADSQSNPKPYIELQKPRKSKGISLMSGVRLAGDGGEMEFERELAWLEERLAKENAEKEEADRKQKIIDEAVANGHGIECGCCFGDEILENMFQCAEGHLFCKECTMRNAETKLGEQQITITCMDLSGCEAPFPESELGRALSDKTFSLYHRLKQAKELELAAIEGLESCPSCPYSAIIENPDEKLFRCMNEICGQVTCRKCRRKEHIPKTCEEMDKERNLDRRHAVEDAMSTALIRNCPKCTKPFIKDSGCNKIVCTTCRTMSCYICRKIIKGYEHFDRQRPNYNAAPDKGKCRLWDSDANPDEEAIRAARDAAAAEVMAAAAAEGDQVNAEELNVDMPEARPGHSAIGNRHLAIPANIPEANRLAALLPNDVDIQPILQLDARLRQLRQERADRANQIPAAQQHANVALNNYNGHIRQHEENIARMINAALARARPGALPPAGPEFRPAVPVIPARAAADPAARIIAPLPARAARRGGGRR

SEQ ID NO: 3307 - protein, 1813 aa, Helicobacter pylori
MNEENDKLETSKKAQQDSPQDLSNEEATEANHFEDLLKEESSDNHLDNPTEAKTHFDEDKLEETQTQIDSGGNETSESSNGSLADKLFKKARKLVDDKRPFTQQKSLDEEVQKLNEEDDQENNEYQENNEYQENNEYQENNGDQEETQMDLIDDETSKKTQQHSPQDLSNEEATEANHFEDSSKESKESSDHHLDNPTETKTNFDEYESEEITNDSNDQEIIKGSKKKYIIGGIVVAVLILIILFSRSIFHYFIPLEDKSSRFSKDRNLYVNDEIQIRQEYNRLLKERNEKGNMIDKNLFFNDDPNRTLYNYLNIAEIEDKNPLRAFYECISNGGNYEECLKLIKDKKLQDQMKKTLEAYNDCIKNAKTEEERIKCLDLIKDENLKKSLLNQQKVQVALDCLKNAKTDEERKECLKLINDPEIREKFRKELELQKELQEYKDCIKNAKTEAEKNECLKGLSKEAIERLKQQALDCLKNAKTDEERNECLKNIPQDLQKELLADMSVKAYKDCVSKARNEKEKKECEKLLTPEAKKKLEQQVLDCLKNAKTDEERKKCLKDLPKDLQSDILAKESLKAYKDCTSQAKTEDEKKECEKLLTPEAKKLLEEEAKESVKAYLDCVSQAKTEAERKECEKLLTPEAKKKLEEAKKSVKAYLDCVSQAKTEDEKKECEKLLTPEAKKLLEQQALDCLKNAKTEAEKKRCVKDLPKDLQKKVLAKESVRVYLDCVSRAKNEAERKECEKLLTPEARKLLEEAKKSVKAYKDCVSRARNEKEKKECEKLLTPEARKLLEEAKKSVKAYLDCVSQAKTEAERKECEKLLTPEAKKLLEEAKESVKAYKDCLSQARNETERKACEKLLTPEARKLLEKQALDCLKNAKTEAEKKRCVKDLPKDLQKKVLAKESVKAYLDCVSQAKNEAERKACEKLLTPEAKKLLEEAKESVKAYKDCVSRARNEKEKQECEKLLTPEARKLLEQEVKKSVKAYLDCVSRARNEKEKQECEKLLTPEAKKLLEKQALDCLKNAKTEAEKKRCVKDLPKDLQKKVLAKESVKAYLDCVSRARNEKEKQECKKLLTPEAKKLLEEAKESLKAYKDCLSQARNETERRACEKLLTPEAKKLLEQEVKKSVKAYLDCVSKARNEKEKQECEKLLTPEARKFLEKQALSCLEKARNEEERKACLKNIPKDLQKNVLAKESLKAYKDCLSQARNEEERRACEKLLTPEARKLLEQEVKKSVKAYLDCVSKARNEKEKQECEKLLTPEARKFLEKELQQKDKAIKDCLKNADPNDRAAIMKCLDGLSDEEKLKYLQEAREKAVADCLAMAKTDEEKRKCQNLYSDLIQEIQNKRAQNKQNQLSKTERLHQASECLDNLDDPTDQEAIEQCLEGLSDSERALILGIKRQADEVDRIYSDLRSRKTFDNMAAKGYPLLPMDFKNGGDIATINATNVDADKIASDNPIYASIEPDITKQYETEKTIKDKNLEAKLAKALGGNKKDDDKEKSEKSTAKAKAESNKIDKDVAETAKNISEIALKNKKEKSGDFVDENGNPIDDKKKEEKQDETSPVKQAFIGKSDPTFVLAQYTPIEITLTSKVDATLTGIVSGVVAKDVWNMNGTMILLDKGTKVYGNYQSVKGGTPIMTRLMIVFTKAITPDGVIIPLANAQAAGMLGEAGVDGYVNNHFMKRIGFAVIASVVNSFLQTAPIIALDKLIGLGKGRSERTPEFNYALGQAINGSMQSSAQMSNQILGQLMNIPPSFYKNEGDSIKILTMDDIDFSGVYDVKITNKSVVDEIIKQSTKTLSREHEEITTSPKGGN

SEQ ID NO: 3308 - protein, 247 aa, Prunus dulcis
  misc_feature (220)..(220): Xaa can be any naturally occurring amino acid
  misc_feature (228)..(228): Xaa can be any naturally occurring amino acid
  misc_feature (235)..(235): Xaa can be any naturally occurring amino acid
  misc_feature (243)..(243): Xaa can be any naturally occurring amino acid
RIENKINRQVTFAKRRNGLLKKAYELSVLCEAEVALIIFSNRGKLYEFCSSSSMLKTLERYQKCNYGAPETNVSAREALELSSQQEYLKLKARYEALQRNQRNLLGEDLGPLSSKELESLERQLDMSLKQIRSTRTQCMLDQLTDLQRKEHMLNEANKTLKQRLFEGYHVNSLQMNPNADEYGRQQTQAHGDGFFHPLDCEPTLQIGYQNDPISVVTAGXSVSNYMAXMVAMIIXKCVLESTXSHEW

SEQ ID NO: 3309 - protein, 244 aa, Triticum aestivum
  misc_feature (234)..(234): Xaa can be any naturally occurring amino acid
MGMAAVKVEGRDGCAESRQHLALSSPSASEGGSYGGGHPWASPLVPSPADSGSSRRRISGPVRRAKGGWTPEEDETLRKAVTVFKGKNWKRVAEFFPDRTEVQCLHRWQKVLDPELIKGPWTQEEDDTIIQKVKEHGPTKWSVIARSLHGRIGKQCRERWHNHLDPQIRKEAWTFEEEQVLVDAHRMHGNKWAEIAKLLPGRTDNSIKNHWNSSVRKRLDEYDTGAAHPVPVHXSHNDLKQVAM

SEQ ID NO: 3310 - protein, 147 aa, Zea mays
MREEDSNWFAKWEEELPSPEELIPLSQSLITPDLAIAFDLRSPNQPQPQTTPPPQQTNSSAEFAVDSSGDEPARTLKRPRLVWTPQLHKRFVDAVAHLGIKNAVPKTIMQLMSVDGLTRENVASHLQKYRLYLKRMQSGGGGGGNVV

SEQ ID NO: 3311 - protein, 361 aa, Zea mays
  misc_feature (346)..(346): Xaa can be any naturally occurring amino acid
MDGSRKRVDAEDVKGDSTGGKRLRASESFQSGVGSKVKLCTNFFSTYGCPFGEGCHFVHYFPGDYRAVSEMTNLGGATIAPPGGMMMDGPPTPIVKTRLCNKYNTAEGCKWGDRCHFAHGESELGKSMMDNYMPPPIGPPPTGYFAPPPMAPPPMAPPPMAPPPMAPLPPPMAPPPMAPPPMAPPPMAPPPMAPLPMAPPPMAPPPMAPPPMAPPPMAPLPMAPPPMAPPPMANPGLATPASFGAYATAKISVDASLAGGIIGKGGANIKQISSVTGAKVVIQEDRHESDTSLKNIEFEGTFDQIRNASAMVIELIVSISGIGSNFKTKMCENFAKGSCSYGGKCXHFAHGESELRKPAAA

SEQ ID NO: 3312 - protein, 189 aa, Triticum aestivum
  misc_feature (131)..(131): Xaa can be any naturally occurring amino acid
  misc_feature (139)..(139): Xaa can be any naturally occurring amino acid
  misc_feature (171)..(171): Xaa can be any naturally occurring amino acid
MGAPKQKWTAEEEAALKAGIGKHGAGKWRTILKDPEFSNILRYRSNVDLKDKWRNMNVTVNASGTRDKVRTTTTTTPTAKKPRSAPKQENHPTAITTITSDGDDDVIDVKPIIKPYCSGNKSLSRLENIIXEAVKTLNXPTGSYKTPLLISIGQYWAPADLIMYVCKLNDXHREIKTYPTLFKGNSNAL

SEQ ID NO: 3313 - protein, 214 aa, Agapanthus praecox
MGRGRIEIKKIENSTTRQVTYSKRRLGIMKKAKELTVLCDAEVSVLMFSSTGKFADYCSPSTNTKSIMDRYQQATGIDLWKDQFEKMQNTLRRLEETNRKLRKEIRQRMGEDLDELSIKEMRGLEQSLDETLMNVRQRKYHVITTQTDTYKKKLKSTHEAHRSLLRELEMKDEQQDYGFVTEDALAIVNEGAPMFALRVQPSQPNLFGFGGPMI

SEQ ID NO: 3314 - protein, 201 aa, Candida glabrata CBS 138
MEKMEKTYGQEPGQEPGQEPGQEQEQALEQSREQEQGRGAGMKGEELDVQFDNGAHEDGLEFEEDEDVFRNVGLGLEGHYKEIMIEYWQQLINEIESTNEPGSEYQDDFKSHSLPFARIRRVMKTDEEVKMISAEAPIIFAKACEVFITELTMRAWCVAEKHKRRTLQKADIAEALQMSDMFDFLIDIVPRSTIGAQNNSS

SEQ ID NO: 3315 - protein, 255 aa, Gossypium barbadense
MEMYPSTIDSDLMMLDSIRRHLLGESSDLRFTSSNDCTNVGAAPPMFCRSSSFSRLYPCLTDTRGDLPLKENDSEDMLVFGYLRDALTVGWAPSDHSSPTFPPIKPEPQEIPTETAVKEVPTVANAAVPTVVPAKGKHYRGVRQRPWGKFAAEIRDPAKNGARVWLGTFETAEDAALAYDKAAYRMRGSRALLNFPLRVNSGEPDPVRITSKRATPEPSTSSSSGSENGSPKRTRKVRSAAPVVAQAGLNMGFGA

SEQ ID NO: 3316 - protein, 143 aa, Zea mays
MSLPPGPADSGAGTGDDWFLDCGILDDLPAAACGAFPWDASPSSSNPSVEVGSYVNANDAFKEPNDVFKEPGSSKRERMRRNKLNDRFLELGSALEPGKPVKADKAAILSDATRMVIQLRSESQQLKETNGSLEEKIKELKAE

SEQ ID NO: 3317 - protein, 306 aa, Triticum aestivum
MSMSFLSMVETELPPGFRFHPRDDELICDYLAPKVTGKVGFSGRRPPMVDVDLNKVEPWDLPVTASVGGKEWYFYSLKDRKYATGQRTNRATVSGYWKATGKDRVVARRGALVGMRKTLVFYQGRAPKGRKTEWVMHEYRLEGAHEQASKQEDWVLCRVICKKKSGVGATPRPRNLSNIVHGTPTDTSSPPLPPLMDTTLAQLQATMNTSAAAAAAALEQVPCFSSFSNNSASNSSYLPMVTGNSNGMSYLDHGLPDFGSYLDPAMNCDKKVLKAVLSQLSSMGGEVVPSMSPQMAAAVSSTWNHF

SEQ ID NO: 3318 - protein, 384 aa, Morus alba
MKERQRWQPEEDALLRAYVKQYGPRDWNLVYQRMGKPLHRDPKSCLERWKNYLKPGLKKGSLTPEEQSLVISLQAKYGNKWKKIAAEVPGRTAKRLGKWWEVFKEKQLKQLQLQKKPPSQPDGNIPVAVAVAGGSSPADKAVQGPYDHILETFAEKYVHQQRPNLNPAILPVVPFPMPNPDPVLSLGSVNSTPPPALPPWMNLNVNVNATTSSLSSCTTSSSATPSPSVSLSLSPSEPVQQQTLEQEMNRFLPVQQMASIFQCCKELEEGRQSWLQHKKEATWRPSRLEQQLESEKSKKRKEKMEEIDAKIRSLREEEMAFLSRIEGEYREQLLALQRDAEAKEAKLVEAWCGKHVKLAKLLDQIGAHHCCNATNGFTAFPNPN

SEQ ID NO: 3319 - protein, 246 aa, Helianthus annuus
SYMSSCPFKKNEIFFANKTIYEAALSSSTLHIVDFGIAYGFQWPILIKHLGDRPGGPPKLRITGIEFPQPGFRPAEWVEETGRRLATYCERFKVPFEYNAIAIQNWEMINIDDLKLQRNEFLAVNALARFENLLDETMVTGSSPRDAVLKLIRDMKPDILVHSIVNGSYSAPFFVTRFREALFHYSALFDMLDATIERENEQRQSYEGEFHGRQVMNVIACEGHQRVERPETYKQWQVRITRAGSN

SEQ ID NO: 3320 - protein, 340 aa, Paraboea crassifolia
MGRAPCCDKTGLLMKKGPWSQEEDQKLLDYIQKYGYGNWRTLPTNAGLQRCGKSCRLRWTNYLRPDIKRGRFSFEEEETIIRLHSILGNKWSLIAARLPGRTDNEIKNYWNTNIRKRLLRMGIDPVTHSPRLQLLDLSTILNSSLCNNSPTQMNFSRLQPRFNPELLRFAASLFSSNCQSQDFPMQNQITSNNQIPPPFMQTSVQDVAVLPDLCADTNLGTSFSVHDEVQEFQQNPAGYGMPSALTGEYVPVLNDGYYGSGDQPFVDPTPSSVTSNFQSYCSNSLGFQSIFSTPPSSPTPLNSNSTYVNSCSSTEDETESYYNSMWKFEIPDNLRINDFM

SEQ ID NO: 3321 - protein, 607 aa, Oryza sativa (indica cultivar-group)
MDSEDDMLDANDSADDDFYSGGEAGLGGSDDGDADYDFADHDSDDSAELLSHRQQKNNGNSMGVLFGRVGSGDINSWDKDSLQEIGYGITVNELWIYPYPYHTETTAIIRKGSRSHEDEQNYSILSEADIQQRQEDDINRVSTVLSISKSEACVLLRNYNWSVSKVHDEWFADEEHVRKVVGFPEKLIEMPNDRELTCGICFENCPRTSMSAAACGHPFCSACWRGCLMLRCPDPSCTAAVGQDMINSLADDEDREKYGRYLRRSYIEDNRKTKWCPAPGCEYAVEFVMGSGSYDVNCNCSYGFCWNCTEEAHRPVDCATVSKWILKNSAESENMNWILANSKPCPKCKRPIEKNQGCMHITCTPPCKFEFCWLCLGPWSEHGERTGGFYACNRYEAARQEGAYDESERRREMAKNSLERYTHYYERWAANQSSRQKALGDLLSLQNDKLEKLSDIQSQPESQLKFIIEAWLQIVECRRVLKWTYAYGFYLPEHEHAKRQFFEYLQGEAESGLERLHQCAEKELQVYLEAESPSKDFNDFRTKLAGLTSVTRNYFENLVRALETGLNDVGPSTSHGTCSKSATSKSLGSKNLPETARLVTTSIDSIT

SEQ ID NO: 3322 - protein, 160 aa, Hordeum vulgare subsp. vulgare
MKGAKSKGAAKADTKLAVKSKGAEKPAAKGKKGKAGKDPNKPKRAPSAFFVFMGEFREEFKQKNPKNKSVAAVGKAAGERWKSLSESEKAPFVAKANKLKGEYNKAIASYNKGESTTAAPKKASSKEVEEEDEEESDKSKSEINDDDDDEGSDEAEDAAE

SEQ ID NO: 3323 - protein, 617 aa, Oryza sativa (japonica cultivar-group)
MLAGCSFSSSRHQMSTAQRFDILPCGFSKRGSRGDGAAPRVAGDARSGATTCSFRTHPAPPVTQSVSWGAKPEPGGNGNGAHRAVKRAHDEDAVEEYGPIVRAKRTRMGGDGDEVWFHQSIAGTMQATAAGEGEEAEEEKVFLVPSAAAFPHGMAAAGPSLAAAKKEEYSKSPSDSSSSSGTDGGSSAMMPPPQPPEFDARNGVPAPGQAEREALELVRALTACADSLSAGNHEAANYYLARLGEMASPAGPTPMHRVAAYFTEALALRVVRMWPHMFDIGPPRELTDDAFGGGDDDAMALRILNAITPIPRFLHFTLNERLLREFEGHERVHVIDFDIKQGLQWPGLLQSLAARAVPPAHVRITGVGESRQELQETGARLARVAAALGLAFEFHAVVDRLEDVRLWMLHVKRGECVAVNCVLAMHRLLRDDAALTDFLGLARSTGATILLLGEHEGGGLNSGRWEARFARALRYYAAAFDAVDAAGLPEASHARAKAEEMFAREIRNAVAFEGPERFERHESFAGWRRRMEDGGGFKNAGIGEREAMQGRMIARMFGPDKYTVQAHGGGGSGGGEALTLRWLDQPLYTVTAWTPAGDGAGGSTVSASTTASHSQQS

SEQ ID NO: 3324 - protein, 192 aa, Triticum aestivum
  misc_feature (72)..(72): Xaa can be any naturally occurring amino acid
  misc_feature (133)..(133): Xaa can be any naturally occurring amino acid
  misc_feature (148)..(148): Xaa can be any naturally occurring amino acid
  misc_feature (150)..(150): Xaa can be any naturally occurring amino acid
MDYGFDGALQLPPGFRFHPTDEELVMYYLCRKCGGLPIAAPVIAEVDLYKFEPWRLPEKAAGGGPDSKEWYXFSPRDRKYPNGSRPNRAAGTGYWKATGADKPVGSPRPVAIKKALVFYAGKPPKGVKTNWIXHEYRLADDNGSAAAXEXQHRLKVDDWVLCPNINKKGVIKRYNPAEFHTGPSTAGARGLV

SEQ ID NO: 3325 - protein, 236 aa, Pisum sativum
MGRGRVQLKRIENKINRQVTFSKRRCGLLKKAHEISVLCDAEVALIVFSNKGKLYEYSSDPCMERILERYERYSYAERQHVPNDQPQNENWIIEHAKLKARLEVIQKNQRNFMGEELDGLSMKELQNLEHQLDSALKQIRSRKNQVVYESISELQKKDKALQEKNNLLTKKIKEKEKALANFELHNDDMDLDSALVPQPLETPNIGCSPQDRGDNEGSQTQSNALLPPWMLRPIND

SEQ ID NO: 3326 - protein, 404 aa, Zea mays
MPHVLSFLHLHLPLNTAPLHSFRVHRTRHSHPHLSLRTRRASATAAAAEAENPSASADVEMVRGRDGVWTARSPTVVVLWDLDNKPPRGPPFPAATALIGAASLLGRVVSISAFANRHAFSHLPGWVTAERRARRALDRSERAGVVVPSVPYSCSVCGRRFPTRPDLTRHFRQLHERERNKKLSRLRSLKGKKRQKFRERFITGNTKYEDAARELLTPKVGYGLASELRRAGVHVRTVPDKPQAADHALKRQVKHSVACGVDWLVLVSDDSDFTDTVRNARAADLRTVVVGDGCRALGKVADIWLPWDRVENGEVDEEMLRSCTFSEYREDQGTERDGQFIGDWDAGDFDDVVDDIVGTRTSLLGATTMSAFADEDIADGIFGVELTGDNMFWSSDDEEEDDYL

SEQ ID NO: 3327 - protein, 300 aa, Oryza sativa (japonica cultivar-group)
MEVGGRKRGKPDGANGAGGKRARESESFQTGVGSKSKPCTKFFSTSGCPFGEGCHFLHHFPGGYQAVAKMTNLGGPAIAPPPGRMPMGNAVPDGPPTPTVKTRLCNKYNTAEGCKWGDKCHFAHGERELGKPMLMDSSMPPPMGPRPTGHFAPPPMPSPAMSTPASFGASATAKISVDASLAGGIIGRGGVNTKQISRVTGAKLAIRDHESDTNLKNIELEGTFDQIKNASAMVRELIVSIGGGAPPQGKKPVGGSHRGGGPGSNFKTKLCENFTKGSCTFGDRCHFAHGENELRKSAAA

SEQ ID NO: 3328 - protein, 313 aa, Gossypium hirsutum
MESTWVDTTLDLNINSSHNTIQVLKRESSGKLADSDVKVPVKQETGALVEELNRIIAENKKLTEMLTVLCERYSSLQNQYMELVSRNSGSDATAATSKKRKAECEDYVPMIGFSGKAESSFSDEDSCKKPKDCIKAKISRAYVRPNPSDNSLIVRDGYQWRKYGQKVTRDNPSPRAYFKCSFAPSCPVKKKVQRSAEDPSILVATYEGEHNHEQHSPPALSSLSPNGGTSNPRSAPVSSSSSAPAKSSPPTVTLELMKPTGLGNDTQNPTQQVDEPAIQQILVQQMAASLTRDPNFTAALASAISGKVLDHKW

SEQ ID NO: 3329 - protein, 139 aa, Arabidopsis lyrata subsp. petraea
STGKRSEREEDTDPQGSRGISDDEDGDNSRKKLRLSKDQSVILEETFKDHSTLNPKQKQALAKQLGLRARQVEVWFQNRRARTKLKQTEVDCEFLRRCCENLTEENRRLQKEVTELRALKLSPQFYMHMSPPTTLTMCP

SEQ ID NO: 3330 - protein, 201 aa, Arabidopsis thaliana
METFEESSDLDVIQKHLFEDLMIPDGFIEDFVFDDTAFVSGLWSLEPFNPVPKLEPSSPVLDPDSYVQEILQREAESSSSSTTTTSPEVETVSNRKKTKRFEETRHYRGVRRRPWGKFAAEIRDPAKKGSRIWLGTFESDIDAARAYDYAAFKLRGRKAVLNFPLDAGKYDAPVNSCRKRRRTDLPQPQGTTTSTSSSSSN

SEQ ID NO: 3331 - protein, 246 aa, Medicago truncatula
MALPKLKQDMIYEMEFQQKGNDILSLEWLSDIVDDSRDENITMKKVEQHPSSSVNKEDFVLPKSNSSPTCEKTTVRRTRSKRPRLATFSSHHSTMQLISSTSSFVGENMQDSVISNKGASTEKFPDSQIAAKKQKLSSGESKKNKKTKAPLLAALDHNALGLVRQCTHCEATKTPQWRTGPEGPKTLCNACGVRYKSGRLCPEYRPAASSTFSPDLHSNSHKKILEMRVMRRKDNKNSGILALEYM

SEQ ID NO: 3332 - protein, 371 aa, Zea mays
MMMSSSSSNTQAVPFRDMGMYEPFQQLSGWENTFNTITTNNHNNNNQTSSTIARTEADANNKGNYTCLYNNSVEAEPSGNNDQGEVQISDKMKRRLAQNREAARKSRLRKKAHVQQLEESRLKLSQLEQELVRARQQGLCVVTSDATYLGPAGTMNTGIAAFEMEHKHWLEEQSKRVSEIRTALQAHISDVELKMLVDVCLNHYANLFRMKAAAAKADVFFLISGMWRTSTERFFQWIGGFRPSELLNVVMPYIEPLTDQQLLEVTNLQQSSQQAEEALSQGLDKLQQGLVENIAVVESLNHGGAQMASAMENLESLEGFVNQADHLRKQSLQQMSKVLTTRQAARGLLALGEYFHRLRALSSLWAARPRN

SEQ ID NO: 3333 - protein, 246 aa, Helianthus annuus
SYMSSCPFKKNEIFFANKTIYEAALSSSTLHIVDFGIAYGFQWPILIKHLGDRPGGPPKLRITGIEFPQPGFRPAEWVEETGRRLATYCERFKVPFEYNAIAIQNWEMINIDDLKLQRNEFLAVNALARFENLLDETMVTGSSPRDAVLKLVRNMKPDIFVHSIVNGSYSAPFFVTRFREALFHYSALFDMLDATIERENEQRQSYEGEFHGRQVMNVIACEGHQRVERPETYKQWQVRITRAGSN

SEQ ID NO: 3334 - protein, 241 aa, Arabidopsis thaliana
MEEGGSSHDAESSKKLGRGKIEIKRIENTTNRQVTFCKRRNGLLKKAYELSVLCDAEVALVIFSTRGRLYEYANNRYKKACSDAVNPPSVTEANTQYYQQEASKLRRQIRDIQNSNRHIVGESLGSLNFKELKNLEGRLEKGISRVRSKKNELLVAEIEYMQKREMELQHNNMYLRAKIAEGARLNPDQQESSVIQGTTVYESGVSSHDQSQHYNRNYIPVNLLEPNQQFSGQDQPPLQLV

SEQ ID NO: 3335 - protein, 926 aa, Oryza sativa (indica cultivar-group)
MELGEEKEERKRGSKSQMEGESTMSESKSSSRGKKKSKTTSEQKVEIHTKETQNLENTKKKQEEGKIKRNKKAPVQDLNYVMLKIYVKEGNPGSSSHEKLLAIGGRYDWLIEQAWDRTYSWLPFCEPRLRTVASVQGSRQCSCSPVQLSVVVAAAAVQNYSILSEADIQQRQEDDINRVSTVLSISKSEACVLLRNYNWSVSKVHDEWFADEEHVRKVVGFPEKLIEMPNDRECMLERFDNLTLRYFSLSTPDSVLCGITTYIVHIDRCPDPSCTAAVGQDMINSLADDEDREKYGRYLRRSYIEDNRKTKWCPAPGCEYAVEFVMGSGSYDVNCNCSYGFCWNCTEEAHRPVDCATVSKWILKNSAESENMNWILANSKPCPKCKRPIEKNQGCMHITCTPPCKFEFCWLCLGPWSEHGERTGGFYACNRYEAARQEGAYDESERRREMAKNSLERYTHYYERWAAIQSSRQKALGDLLSLQNDKLEKLSDIQSQPESQLKFIIEAWLQIVECRRVLKWTYAYGFYLPEHEHAKRQFFEYLQGEAESGLERLHQCAEKELQVYLEAESPSKDFNDFRTKLAGLTSVTRNYFENLVRALETGLNDVGPSTSHGTCSKSATSKSLGSKILRVDLKEIVWIGCGFRRLLPHDVSPGLLPSKATSCVPIVSERDLQLPSPAVEIIPSKSAHPYKYAGEKVDVQGLDIFKGKVSVADMIAFSPSEVVASKYDETIRCRAIPNVLANLEQARDRQNRPSESPVTPSRQLLAPNVHFYAGDWEELPTILSVVHPPAAPTNLSFSEDDFMDGCSSHDGSSIVGVDNCPRRSRKLSGSRAWERASETDQADGGYDVILISEVPYAVNSLKKLYALITKCLRPPYGVLYVASKKNLVGSNGGARQLRALMEEEGVLGGHFLTELADREIWKFFFK

SEQ ID NO: 3336 - protein, 246 aa, Helianthus annuus
SYMSSCPFKKNEIFFANKTIYEAALSSSTLHIVDFGIAYGFQWPILIKHLGDRPGGPPKLRITGIEFPQPGFRPAEWVEETGRRLATYCERFKVPFEYNAIAIQNWEMINIDDLKLQRNEFLAVNALARFENLLDETMVTGSSPRDAVLKLVRDMKPDIFVHSIVNGSYSAPFFVTRFREALFHYSALFDMLDATIERENEQRQSYEGEFHGRQVMNVIACEGHQRVERPETYKQWQVRITLAGSN

SEQ ID NO: 3337 - protein, 251 aa, Arabidopsis thaliana
MMNRSMSFTGVSDHHHLTQKSPTTTNNMNDQDQVGEEDNLSDDGSHMMLGEKKKRLNLEQVRALEKSFELGNKLEPERKMQLAKALGLQPRQIAIWFQNRRARWKTKQLERDYDSLKKQFDVLKSDNDSLLAHNKKLHAELVALKKHDRKESAKIKREFAEASWSNNGSTENNHNNNSSDANHVSMIKDLFPSSIRSATATTTSTHIDHQIVQDQDQGFCNMFNGIDETTSASYWAWPDQQQQHHNHHQFN

SEQ ID NO: 3338 - protein, 718 aa, Solanum tuberosum
MAGKNSGDNRTRTSVSIFIIAGLCCFFYLLGAWQRSGFGKGDSIAEAVTKTAGENCDILPNLNFETRHAGEAGGTDESEEVEELKPCDPQYTDYTPCQDQKRAMTFPRENMNYRERHCPPQEEKLHCLIPAPKGYVTPFPWPKSRDYVPYANAPYKSLTVEKAIQNWVQYEGNVFRFPGGGTQFPQGADKYIDQLASVVPIENGTVRTALDTGCGVASWGAYLWKRNVIAMSFAPRDSHEAQVQFALERGVPAVIGVLGTIKMPYPSKAFDMAHCSRCLIPWGAADGILMMEVDRVLRPGGYWVLSGPPINWKVNFKAWQRPKEDLEEEQRKIEEAAKLLCWEKISEKGETAIWQKRKDSASCRSAQENSAARVCKPSDPDSVWFPLEHVKKVQYVNLNCLGGRKFTKYAGQSICHNMIRYNKMEMCITPNTGNGGDESLKPFPERLYAVPPRIANGLVSGVSVAKYQEDSKKWKKHVSAYKKINKLLDTGRYRNIMDMNAGLGGFAAALHSPKFWVMNVMPTIAEKNTLGVIFERGLIAFYSCISFRPILKNDFLETKGLSKTVFLPHKGLITPHPPHTPLVGLYWDHMIETLISPGSMCFVYMLELRSRLPPKCEAFSTYPRTYDLIHASGLFSLYKDKCEFEDILLEMDRILRPEGAVILRDNVDVLIKVKKIIGGMRWNFKLMDHEDGPLVPEKILVAVKQYWTLGDTNSTSSQ

SEQ ID NO: 3339 - protein, 772 aa, Oryza sativa (japonica cultivar-group)
MAGGGAKLQQQQAPTSPTASVSESNIVASTASADPEANDALAGLQALRFDGGGDIDDVEIQSPDIALWESIFADQIGVSGAGADFLLSMSSAAASPRRDFMACSPKRDYMVTTSSPKRDYMVTSSPKRDYMVSSPKREYMVTSPRREMATSPRRATFSNLYTSSHGGGGGGGHHLHHQSYVHGGGMEGGGGGHGAQPQYGGLAGHGKGKAQSPLHKVYINNVGGGSGGGGVKSNTPSTLSCASSYVVHGGESGLPSLPSMDPFLEEGYLGSYQLPEKAAGGVGGGGGGDINRSGASVSVVTAPASSQLLPTLSECLAMPEPAAYRGGGDEAVAAAMAVAGELPVGAFVQPEMYYGGGGEFGGEGMTPPLQHQMAADSSLHSMLGSVIQSEAEQEQDSGLQLVHLLLACADLVSKGDHPAALRHLHLLRRVASPLGDSMQRVASHFADALAARLSLLSSPTSASPSPRAAAAAAPYPFPPSPETLKVYQILYQACPYIKFAHFTANQAIFEAFHGEDRVHVVDLDILQGYQWPAFLQALAARPGGPPTLRLTGVGHPPAAVRETGRHLASLAASLRVPFEFHAAAADRLERLRPAALHRRVGEALAVNAVNRLHRVPSSHLPPLLSMIRDQAPKIITLVEQEAAHNGPYFLGRFLEALHYYSAIFDSLDATFPAESTARMKVEQCLLAPEIRNVVACEGAERVARHERLERWRRLMEGRGFEAVPLSAAAVGQSQVLLGLYGAGDGYRLTEDSGCLLLGWQDRAIIAASAWRC

SEQ ID NO: 3340 - protein, 350 aa, Oryza sativa
  misc_feature (52)..(52): Xaa can be any naturally occurring amino acid
MAKRAGGARKKLRRGLWSPEEDEKLMNHIAKYGHGCWSSVPKLAEIPICGCXGLERCGKSCRLRWINYLRPDLKRGAFSQEEEDLIIHLHSMLGNKWSQIAAQLPGRTDNEVKNFWNSYIKKKLRQRGIDPATHKPLAEVVAAAACARTPAVFSDAELILSSIGAQPPPESYDGSRYSTECGAASVGGDGSLSSLSGYSQATAEFAVDGASASALLHCGGGGPTSSGGGAPPAPTAAVIPSVSSSSTLNSMVGLSPAATTTTTTTDEQYGNTNHLPWLELGPSTTTPSSSAAAATFDHYGAALDELKWSDYVFDGYNHQLPPYNHGGIYGGGDSKDTAVHFDAHALGNWC

SEQ ID NO: 3341 - protein, 380 aa, Cucurbita maxima
MNPEVLSTDENDKLATRKTEKEQNDAPNSKEKLKKPDKILPCPRCNSMETKFCYYNNYNVNQPRHFCKACQRYWTEGGTIRNVPVGAGRRKNKNSASHYRHITISEALRAAQIDVPIEVNHLASKGNGRVLNFSVSPPVCESMVNVSHPAERKVLNGTRNEFEGAKGPCEGGETGDDCSSASSVTMSSSMKNGARRFPQEPHMQNINGFPSQIPCLPGVPWPCSWTAPIPPPALCPPGVPLSFYPATYWSCSASGSWNIPWVTPQPCPPIPGPNSPTLGKHSRDGDELQADNSEMKDPPKQKNGSVLVPKTLRIDDPNEAAKSSIWETLGIKNDSIKAVDLSNVFQSKGDLKSNVSEVLSPVLQANPAALSRSLTFHERS

SEQ ID NO: 3342 - protein, 363 aa, Prunus persica
MESTDSSTASQQQQQQQPQPPPQPNLPPGFRFHPTDEELVVHYLKKKVTSAPLPVAIIAEIELYKFDPWELPAKATFGEQEWYFFSPRDRKYPNGARPNRAATSGYWKATGTDKPVLTSGGTQKVGVKKALVFYGGKPPKGIKTNWIMHEYRLADSKTSNKPPGCDLGNKKNSLRLDDWVLCRIYKKNNSHRPMDLEREDSMEDMMGPLMPPSISHVGHHQNMNLHLPKSNTNYGPPFIENDQIIFDGIMSSTDGSASLSNGTSQLPLKRSIVPSLYRNDQEDDQTAGASSSKRVVQLHQLDSGTNNSVAANNNSTSIANLLSQLPQTPPLHQHAMLGSLGDGLFRTPYQLPGMNWFSESNLG

SEQ ID NO: 3343 - protein, 326 aa, Triticum aestivum
MSDPSSTASSYPAAPRLTTGVINFLARPRPWPPRPPPGQQHSLHSPGSFHRLPPTLRHGTTTPRPRPPPLLPFDASDADEMLLLDMLSQHQQEAMHTASAPIPTTTAATAVKREASEEEEVKVPVGGSGRAFRGVRKRPWGKFAAEIRDSTRDGVRVWLGTFDSPEEAALAYDQAAFAMRGGAAVLNFPADHVRRSLEGAGDDVCGRADGLSPVLALKRRHSMHRRASTTRKTCRAVRTGRPEGVMELEGLGAEYLEGAARRLRRHDDLGLQSMVLESPLHLILKSASRKMAMARRPWIDPGWGFSFLPGGGGPPGPFVPEFSWTR

SEQ ID NO: 3344 - protein, 326 aa, Zea mays
MDIMALNARDEEQYGNNHLGLGLSLSLGLGVATAAPVEVEPPPPPRQQQQRAISVAPITSLPAPQWWKWNSPGLFFGTTMDPSLERNQQQQQPAAARHGHEMPFLRGVDVNRAPAGETRRGSCSEDDEEPGGASSSPNSTLSSSLSGKRAAPARSGGEVADHTPRAGGGSDDEDSGGGSRKKLRLSKDQAAVLEESFKEHNTLNPKQKAALAKQLNLKPRQVEVWFQNRRARTKLKQTEVDCEFLKRCCETLTEENRRLQQEVAELRALKLVAPHHYARMPPPTTLTMCPSCERLASASASADQAGRAGPCWGPLPVFVDGPARRP

SEQ ID NO: 3345 - protein, 286 aa, Ostreococcus tauri
MLAKPTPFAGRDGTAKARAGQGATNGARTERKKGVAWTEEEHKNFLIGLQKLGKGDWRGISRHFVTTRTPTQVASHAQKYFIRQTNVSKRKRRSSLFDIVAEPTENGDGHTIVHRSTADAANASTHTKAVGARATNGVHKKTQHHTGGMYVNPRESTNATRSVDVQQHRVTGSALTTSLSNLADVASREAHYVASHHITQPVGAIWMHNATARAQNQQEMGTSAAIKIDEEVHPTFPMIHGAIHGAVASFRTAYGRRRDWPAEPHQPDESDGLDGATEHGLSDGGA

SEQ ID NO: 3346 - protein, 153 aa, Cryptococcus neoformans var. neoformans JEC21
MAEQQVQLTDLNAVQLQEVKKQLDQELDHLTTSYSQLKQAQTKFKSCIANVNELSPTSKGKEVLIPLTSSLYVPGKLTDVENVVIDVGTGYYIKKTKAEATKHYTSKSEFVQTNLDTLQQSIETKQNNVQSVQQVLAMKMQQAQAAAAGGQKA

SEQ ID NO: 3347 - protein, 198 aa, Gossypium hirsutum
MPATFEESTTLEFIRQHLLGDFATVDAFINTLDFGLSHLQPQSHQLPEIFTHGVEPAPITKEPFCEEKRHYRGVRRRPWGKFAAEIRDPNRKGIRVWLGTYDSDVDAAKAYDCAAFKMRGQKAILNFPLEAGEGSQPPAVTTGRKRRREKRVWLPESDITSPGSSEMAWEVKEEEGELDDDDRNGLSLLTRKRVIVTC

SEQ ID NO: 3348 - protein, 253 aa, Helianthus annuus
MGKGRLELKRIENKINRQVTFAKRRNGLLKKAYELSVLCDAEVALIIFSTRGKLYEFSSTSSMLKTLERYEKCSFGPPEQRKPAKEDLQEQSSYQEYMRLKERYDALKQLERNYYGEEIDSLTTNELESLERQLHCSLKQIRTIRTQSLIDKLYEQQKMEHQLYEYNKTLRLRLDEESQAEALQWDVHAHAHANGMVYGHHHQHQVSHPAHGAFYHPTGCETTLQIGYQTEQISGATSSSMSHHHHQMQGWPA

SEQ ID NO: 3349 - protein, 125 aa, Brassica napus
MMKRLSSSDSVGGLISLCPTTSTDQPNPRRCGREFQSMLEGYEEEEEEAITEERGQTGLAEKKRRLNINQVKALEKNFELENKLEPERKVKLAQELGLQPRQVAVWFQNRRARWKTKQLEKDYGV

SEQ ID NO: 3350 - protein, 244 aa, Arabidopsis thaliana
MRKGRGSSVVGPALPVTAGGSVKEPRYRGVRKRPWGRFAAEIRDPLKKSRVWLGTFDSAVDAARAYDTAARNLRGPKAKTNFPIDCSPSSPLQPLTYLHNQNLCSPPVIQNQIDPFMDHRLYGGGNFQEQQQQQIISRPASSSMSSTVKSCSGPRPMEAAAASSSVAKPLHAIKRYPRTPPVAPEDCHSDCDSSSSVIDDGDDIASSSSRRKTPFQFDLNFPPLDGVDLFAGGIDDLHCTDLRL

SEQ ID NO: 3351 - protein, 430 aa, Zea mays
MGRHSCCYKQKLRKGLWSPEEDEKLMNHITKHGHGCWSSIPKLAGLQRCGKSCRLRWINYLRPDLKRGAFSQDEEDLIIELHAVLGNRWSQIAAQLPGRTDNEIKNLWNSCIKKKLRQKGIDPNTHKPLTEADRSGAAPTISTERTSGSSDINPSSAGALGNLSHLLSETAQSSMLMPVYDKNRAETPNLARPKVPPKELFLEQLTAGHESPSTCRSSGQTLYFPFQQPLGYNSESGSGDGANMNSLWFNQSDFNCSTISTVMPPASPSALSTSMGLNLPPDNSRHGGTGIGSTAVDSFYWDGTNPSSSSSTGSRGSNSMGFEPQSTSSILENSVFPWTDIGQEKDTRAHLVEELKWPDLLHGTFAETTTAMQNQSQTLYDDVIKAESQFSMEGICASWFQNQQPQQQLQATPDMYDKDLQRMQLSFENI

SEQ ID NO: 3352 - protein, 246 aa, Helianthus annuus
SYMSSCPFKKNEIFFANKTIYEAALSSSTLHIVDFGIAYGFQWPILIKHLGDRPGGPPKLRITGIEFPQPGFRPAEWVEETGRRLATYCERFKVPFEYNAIAIQSWEMINIDDLKLQRNEFLAVNALARFENLLDETMVTGSSPRDAVLKLVRDMKPDIFVHSIVNGSYSAPFFVTRFREALFHYSALFDMLDATIERENEQRQSYEGEFHGRQVMNVIACEGHQRVERPETYKQWQVRITRAGSN

SEQ ID NO: 3353 - protein, 334 aa, Aspergillus fumigatus
MQAAQQSWELENTISLIDPQRDALYRYDEETHKALSAARPWAKDPHYFKSIRISAVALIKMTMHARSGGSLEVMGLMQGYILPETFVVTDAFRLPVEGTETRVNAQEEANEYMVSYLQSCRDAGRMENAVGWYHSHPGYGCWLSGIDVTTQDMQQLGGPFVAVVIDPERTISAGKVDIGAFRTFPKDYTPPKEGNEDEDYQTIPLSKAEDFGAYAHQYYSLEVSFFKSSLDTELLSQLWNKYWVATLSQSPLFTTRDYGSRQMMDLSQKVRRAARGIESSGSRGGATTPKDQQLEKIVRDGQRIVSEEVKGLLAAEVKMKLFQGIGEGTQTGAS

SEQ ID NO: 3354 - protein, 620 aa, Zea mays
NPLPCYHFDLEQAHSSCCRLAAVAAYMDTLFRLVSLQASEQQQQQQSASYNSRSTTSSGSRSSSHQTNASYNYYYHSNSSGGGGGGQYYYGQQHPQQHQHQQYYLEPYQQEECGNTHHLYMDEDFSSSSSSRQHFHSHGAVVQPPTSSTATPTAPTPSLSTSSTAAGAAHALFEAADLSFPPDLNLDFSSPASSSGGGAASSAAVGGGGGGRWASQLLLECARAVAGRDSQRVQQLMWMLNELASPYGDVEQKLASYFLQGLFARLTASGPRTLRTLAAASDRNTSFDSTRRTALRFQELSPWSSFGHVAANGAILESFLEAAAASPEPQRLHILDLSNTFCTQWPTLLEALATRSADDTPHLSITTVVSSAPSAPTAAVQRVMREIGQRMEKFARLMGVPFSFRAVHHAGDLAGLDLDALDLRDGGATTALAINCVNSLRGVVPGGARRRDAFAASLRRLDPRVVTVVEEEADLVAFDPGAPEESGDTEAAFLKVFGEGLRFFSAYMDSLEESFPKTSNERLALERGAGRAIVDLVSCPASESMERRETAASWARRMRSSGFSPVAFSEDVADDVRSLLRRYREGWSMRDAGLDDSAAGAGVFLAWKEQPLVWASAWRP

SEQ ID NO: 3355 - protein, 335 aa, Emericella nidulans
MQAAQLSWELENAVTLIDPQRDSLYRYDEETHKYLSDTRPWTKDPHYFKSVRISAVALLKMVMHARSGGSLEVMGLMQGYILPNTFVVTDAFRLPVEGTETRVNAQDEANEYMVSYLQSCREAGRMENAVGWYHSHPGYGCWLSGIDVSTQDMQQMSGPFVAVVIDPERTISAGKVDIGAFRTFPKDYTPPKEEQEEDEYQTVPLNKAEDFGAHASHYYSLEVSLFKSALDTEILSLLWNKYWVATLSQSPLFTTRDYGSKQMLDLSQKTRRVARGIESNPPRGGAPTQVRDQQLERVVKDGQRIVSEEVKGLLAAEVKMQLFQGIGGKQTVEST

SEQ ID NO: 3356 - protein, 218 aa, Ipomoea batatas
MGRGKVEIRRIEKSTNRRVTFWKRRNGLLKKAMEMGILCDAEVGLMIFSSTGKLHEFATTSIRSVIERYNKTQGDGLQSPLDPTLELKFWQIKVAILRKQLHNMQEDHRKAMGEVYGLSVKDLLNLENQLEMSMSSIIMKKEQLLIDQILELTHQQRSIVLQENFELFNKFQAYGTSDPNAVNGDTISPYDFTISEESQGHIHFQLPQNFSDLARALY

SEQ ID NO: 3357 - protein, 503 aa, Glycine max
MDTLFRLVSFHQQQQPQQQPDPSLNSTTSRTSSSSRSSRQNYYPYSHQEEEECFNFYMDEEDLSSSSSKHYYHPYQPHHHQQHNVSNISTNTFSTTPNTDYSYSYSFSPTQPVQDFNFEFSSPNWSHNLLLESARAVADNNSTRLHHLLWMLNELSSPYGDTEQKLAAYFLRALFSRVTEAGDRTYRSLASASEKTCSFESTRKTVLKFQEVSPWTTFGHVASNGAILEALEGNSKLHILDISNTYCTQWPMLLEALATRSEETPHLCLTTIVTGSRIGNNVQRVMKEIGTRMEKFARLMGVPFKFNVVHHYGDLSEFNFSELDIKDDEALAVNCVNSLHSVSALGNNRDALISALQALQPRIVTVVEEEADLDVGIDGYEFVKGFEESLRWFRVYFEALDESFVKTSNERLMLERAAGRAVVDLVACSPADSVERRETAARWAARLHNGGLNAAPFSDEVCDDVRALLRRYKEGWSMAACSDAGIFLSWKDTPVVWASAWRP

SEQ ID NO: 3358 - protein, 194 aa, Solanum demissum
MVGKISSDLPPGFRFHPTDEELIMYYLRYQATSRPCPVSIIPEIDVYKFDPWELPEKAEFGENEWYFFTPRDRKYPNGVRPNRAAVSGYWKATGTDKAIYSANKYVGIKKALVFYKGKPPKGVKTDWIMHEYRLSDSKSQTYSKQSGSMRLDDWVLCRIYKKKNLGKTIEMMKVEEEELEAQNPLFVNPTFQSQ

SEQ ID NO: 3359 - protein, 233 aa, Oryza sativa (japonica cultivar-group)
MHIYKEQEAEPSTGLMMPEPAPVASPGSGGSGGSGSVGAEKIGSRGKIEIKRIENTTNRQVTFCKRRSGLLKKAYELSVLCDAEVALVVFSSRGRLYEYSNNSVKETIERYKKANSDTSNASTVAEINAQHYQQEAAKLKQQITNLQNSNRTLVGDNITTMNHRELKQLEGRLDKGLGKIRARKNELLCAEIEYMQRRETELQNDNMYLKSKVAESERGLQTVNMMGSASTSE

SEQ ID NO: 3360 - protein, 403 aa, Zea mays
MRHASPPQELPAAGREIQAALAPANGNAAGARGGGGSFTALLGLPTPQAMELLLPRTTPPALALAPAAAPAPTPTFPSDPHLVDRAGRFSTFAPPSPPSPSPTQQPPPPPPAAVAGKRKADPVDRASKGKAAKKGKTAEEKPAAAGGEDEKPAYVHVRARRGQATDSHSLAERARREKINARMELLKELVPGCSKVSGTALVLDEIINHVQSLQRQVEYLSMRLATVNPRGDFGGLDSFLTTELNLKLFDSLGTRVLFLFDKFGTEGAVGNSYPAVCGRIASFNCKNGIDLEQVTWPEMGVHGARQLMQLQQQFWHGDLAHPHQVASQWEKRGDGHPPVFSNSSPSLFGYDLTSSGKPCTQSYITFLNEFSCLSLTSHITAWLAPQLLSLSLSRQCSLENKVY

SEQ ID NO: 3361 - protein, 150 aa, Brassica napus
GSVYRFTERNNNYKMDVIAFDIHTEKFRLLPKIHSSSDPDLNDHRSMCTLDDRLCILITTSILDKEFWRLKSSEDMWEKIYTINFLSTPLSWIGSESYWRPVTMWKKKKMLLSHPCSGNLVIYNLQTGSVRIIHSHTLCMPYFESLISHI

SEQ ID NO: 3362 - protein, 1894 aa, Helicobacter pylori
MNEENDKLETSKKTQQHSPQDLSNEEATEANHFEDSSKESKESSDHHLDNYTEAKTNFDEYESEETQTQMDFGGNETSESSNGSLADKLFKKARKLVDNKRPFTQQKNLDEEIQEPNEEYDQENNGYQEETQMDLIDDETSKKTQQHSPQDLSNEEATEANHFEDSSKESKESSDHHLDNYTEAKTNFDEYESEETQTQMDFGGNETSESSNGSLADKLFKKARKLVDNKRPFTQQKNLDEEIQEPNEEYDQENNGYQEETQMDLIDDETSKKTQQHSPQDLSNEEATEANHFEDSSKESKESSDHHLDNYTEAKTNFDEYESEEITNDSNDQEIIKGSKKKYIIGGIVVAVLIVIILFSRSIFHYFIPLEDKSSRFSKDRNLYVNDEIQIRQEYNRLLKERNEKGNMIDKNLFFNDDPNRTLYNYLNIAEIEDKNPLRAFYECISNGGNYEECLKLIKDKKLQDQMKKTLEAYNDCIKNAKTEEERIKCLDLIKDENLKKSLLNQQKVQVALDCLKNAKTDEERNECLKLINDPEIREKFRKELGLQKELQEYKDCIKNAKTEAEKNECLKGLSKEAIERLKQQALDCLKNAKTDEERNECLKNIPQDLQKELLADMSVKAYKDCVSRARNEKEKKECEKLLTPEAKKKLEQQVLDCLKNAKTDEERKKCLKNLPKDLQSDILAKESLKAYKDCVSQARTEAEKKECEKLLTPEAKKLLEEEAKESVKAYLDCVSQAKTEAEKKECEKLLTPEARKLLEEAKESLKAYKDCLSQARNEEERRACEKLLTPEARKLLENQALDCLKNAKTEAEKKRCVKDLPKDLQKKVLAKESVRVYLDCVSKAKNEAEKKECEKLLTPEAKKKLEQQVLDCLKNAKTDEERKKCLKNLPKDLQSDILAKESLKAYKDCVSQARTEAEKKECEKLLTPEAKKLLEEEAKESVKAYLDCVSQAKTEAEKKECEKLLTPEARKLLEEAKKSVKAYKDCVSRARNEKEKKECEKLLTPEARKLLEEAKKSVKAYLDCVSQAKNEAERKECEKLLTPEARKLLEEAKKSVKAYKDCVSRARNEKEKKECEKLLTPEARKLLENQALDCLKNAKTEAEKKRCVKDLPKDLQKKVLAKESVRVYLDCVSKAKNEAEKKECEKLLTPEARKLLEEAKKSVKAYKDCVSRARNEKEKKECEKLLTPEARKLLEEAKKSVKAYLDCVSQAKNEAERKECEKLLTPEARKLLEEAKKSVKAYKDCVSRARNEKEKKECEKLLTPEARKLLEEAKKSVKAYLDCVSQAKNEAERKECEKLLTPEARKLLEEAKESLKAYKDCLSQARNEEERRACEKLLTPEARKFLEKQRQQKDKAIKDCLKNANPNDRAAIMKCLDGLSDEEKLKYLQEAREKAVLDCLKTARTDEEKRKCQNLYSGLIQEIQNKRAQNKQNQLSKTERLHQASECLDNLDDPTDQEAIEQCLEGLSDSERALILGIKRQADEVDRIYSDLRSRKTFDNMAAKGYPLLPMDFKNGGDIATINATNVDADKIASDNPIYASIEPDITKQYETEKTIKDKSLEAKLAKALGGDKKDDDKEKSKKPTAETKAESNKIDKDVAETAKNISEIALKNKKEKSGDFVDENGNPIDDKKKEEKQDETSPVKQAFIGKSDPTFVLAQYTPIEITLTSKVDATLTGIVSGVVAKDVWNMNGTMILLDKGTKVYGNYQSVKGGTPIMTRLMIVFTKAITPDGVIIPLANAQAAGMLGEAGVDGYVNNHFMKRIGFAVIASVVNSFLQTAPIIALDKLIGLGKGRSERTPEFNYALGQAINGSMQSSAQMSNQILGQLMNIPPSFYKNEGDSIKILTMDDIDFSGVYDVKITNKSVVDEIIKQSTKTLSREHEEITTSPKGGN

SEQ ID NO: 3363 - protein, 326 aa, Aspergillus oryzae
MKLENAISLIDPQRDALYQYDQETHKALSAERPWAKDPHYFKSIRISAVALLKMVMHARSGGSLEVMGLMQGYILPETFVVTDAFRLPVEGTETRVNAQDEANEYMVSYLQACRDAGRMENAVGWYHSHPGYGCWLSGIDVTTQDMQQLGGPFVAVVIDPERTISAGKVDIGAFRTFPKDYTPPKEEQEDDEYQTVPLNKAEDFGAHASHYYSLEVSLFKSVLDTEILSLLWNKYWVATLSQSPLFTTRDYGSKQMMDLSQKVRRAARSIESNPSRGGTTTVKDQQLEKVVRDGQRIVSEEVKGLLAAEVKMKLFQGIGENNKAET

SEQ ID NO: 3364 - protein, 124 aa, Oryza sativa (japonica cultivar-group)
MSSSLFLLPPLFLSLFSPLRLAAGSTGWGGSGRGQERRRELKRRRRRHTLSSLSGKRGAPSAAAAAVGGSDDEDSDDGSRKKLRLSKDQAAVLEDTFNKHNTLNPKQKAALARQLNLKPRQVEV

SEQ ID NO: 3365 - protein, 272 aa, Zea mays
MAPQSLDLGLSLGLGVAAFQPSSFCHPGNAVVVPAAAEREASPAAAEERERRCSPAGSPVSSGSGSGNKRAAAERSAGAGAGSGDEDDDGAARKKLRLSKDQAAVLEECFKTHHTLTPKQKVALASSLGLRPRQVEVWFQNRRARTKLKQTEVDCEYLKRWCEQLAEENRRLGKEVAELRALSAAPAAPLTTLTMCLSCRRVASSSPSSSSSPRPSIPGAAAASGGSMASPAAAATLPAHRQFFCGFRDAGAAAAAYGTASAGLAKPVRAAR

SEQ ID NO: 3366 - protein, 193 aa, Berberis gilgiana
TGIMKKAKELTVLCDAEVSLIMFSSTRKLSEFISPSTSVKKIFDRYQQVTGKQLWQHHYEKMQETLNKLKDVNNNLRREIRQRKGDDDLDDLNIQELRDLEQNMEKSVKAVRDRKFHVICTQTDTSKKKIKNHQETHKFLLSELDQIEQASHFESSSFGLANRSSHEFAFGLQPSTPNLQDGRGYGSYDFHLD

SEQ ID NO: 3367 - protein, 251 aa, Arabidopsis lyrata
MGRGRVQLKRIENKINRQVTFSKRRAGLLKKAHEISVLCDAEVALVVFSHKGKLFEYSTDSCMEKILERYERYSYAERQLIAPESDVNTNWSMEYNRLKAKIELLERNQRHYLGEDLNAMSPKELQNLEQQLDTALKNIRTRKNQLMYESINELQRKEKAIQEQNSMLSKQIKEREKILRAQQEQWDQQNHGHNMPPPPPPQQHQIQHPYMLSHQPSPFLNMGGLYQEEDPMAMRRNELELTLEPVYNCNL

SEQ ID NO: 3368 - protein, 314 aa, Arabidopsis thaliana
MYMYEEERNNINNNQEGLRLEMAFPQHGFMFQQLHEDNAHHLPSPTSLPSCPPHLFYGGGGNYMMNRSMSFTGVSDHHHLTQKSPTTTNNMNDQDQVGEEDNLSDDGSHMMLGEKKKRLNLEQVRALEKSFELGNKLEPERKMQLAKALGLQPRQIAIWFQNRRARWKTKQLERDYDSLKKQFDVLKSDNDSLLAHNKKLHAELVALKKHDRKESAKIKREFAEASWSNNGSTENNHNNNSSDANHVSMIKDLFPSSIRSATATTTSTHIDHQIVQDQDQGFCNMFNGIDETTSASYWAWPDQQQQHHNHHQFN

SEQ ID NO: 3369 - protein, 107 aa, Glycine max
MNYNPQAADWALKRQMVHSMSRGIDWLFLVSDDSDFSEMLRRAREADLGTVVVGDWDRALGRHADLWVPWSGVEIGVGVRPFLDLVVAAVMFFPSENEDCKCVLMVW

SEQ ID NO: 3370 - protein, 253 aa, Brassica napus
MGRGRVELKRIENKINRQVTFAKRRNGLLKKAYELSVLCDAEVALIIFSSRGKQYEFCSSSSMLRTLDRYQKCNYGAPEPNVPSREALAELNSQQEYLKLKERYDALQRTQRNLLGEDLGPLSTKELESLERQLDSSLKQIRALRTQFMLDQLNDLQSKERMLAETNKTLRLRLADGYQMPLQLNPNPEDHHHVDYGRHQQHEHSHHQAFFQPLECEPILQMGYQGQQDHGMGAGPSVNNYMLGWLPYDTNSI

SEQ ID NO: 3371 - protein, 440 aa, Oryza sativa (japonica cultivar-group)
MGECKVGGGGGGGDCLIKLFGKTIPVPEPGACAAGDVDKDLQHSGSSTTEPKTQENTVQDSTSPPPQPEVVDTEDSSADKNSSENQQQQGDTANQKEKLKKPDKILPCPRCSSMDTKFCYYNNYNINQPRHFCKNCQRYWTAGGAMRNVPVGAGRRKSKSVSAASHFLQRVRAALPGDPPLYAPVKTNGTVLSFGSDLSTLDLTEQMKHLKDKFIPTTGIKNTDEMPVGLCAEGLSKTEESNQTNLKEKVSADRSPNVAQHPCMNGGAMWPFGVAPPPAYYTSSIAIPFYPAAAAAVAAYWGCMVPGAWNAPWPPQSQSQSVSSSSAASPVSTMTNCFRLGKHPRDGDEELDSKGNGKVWVPKTVRIDDVDEVARSSIWSLIGIKGDKVGADHGRGCKLAKVFESKDEAKASTHTAISSLPFMQGNPAALTRSVTFQEGS

SEQ ID NO: 3372 - protein, 318 aa, Oryza sativa (japonica cultivar-group)
MTARSMLRNHPEASVLDTIRQHLLEEPRGGGGGEAAEASFGSLVADMWSDSLPFRDDDADDMVVFGAMRDAFSCGWLPDGVFAEVKPEPLLSPDSSSYDGSSCCFGFADVSEPVTPSDAASGAAEAAAAAAAATAEHGKEEEAAAAVARGKHYRGVRQRPWGKFAAEIRDPAKNGARVWLGTFDTAEDAALAYDRAAYRMRGSRALLNFPLRIGSEIAAAAAAAAAAAAGDKRPSPEPATSESSFSSSSSCTTTTTSSSTSSSGSPKRRKRGEAAAASMSMPLVPPPSQLNWPVQAWYPAAAPVEQVAITPRVEQLVI

SEQ ID NO: 3373 - protein, 392 aa, Brassica napus
  misc_feature (45)..(45): Xaa can be any naturally occurring amino acid
MCCGSDQLDQISASEDSTTNTEMNHLTVETEDTFASLLELAANNXDVEGVRLSIDRDPSCVDEPGLWYGRQKGSKAMVNDHRTPLMVAATYGSIDVIKLILSLTDVNRACGSDQTTALHCAASGGAVNAVQVVKLLLAAGADLNLMDADGQRAGDVIVVPPKLEGVKLMLQELLSAATAERNLRVVTNVRTSRSNSPNEEEYGDGDGESPFKMKSSTEFKKEYPVDPSLPDIKNSIYSTDEFRMYSFKVRPCSRAYSHDWTECPFVHPGENARRRDPRKFHYSCVPCPDFRKGACRRGDMCEFAHGVFECWLHPAQYRTRLCKDGTGCARRVCFFAHIPEELRPLYESTGSAVLSPQSNADFAAALSLLPPGSPSGVSVMSPLSPSSGGNGM

SEQ ID NO: 3374 - protein, 182 aa, Pyrus x bretschneideri
YSKRRNGLFKKANELTVLCDAEVSLIMVSSSGKVHEYISPSTTTKQLLDQYRKTLGIDIWSSHYEAMQEHLKKLKEVNMNLRRQIRQRVGDCLNDLSFDELRGLQEEVEAAVAVIRQRKVRMISNKIDTTKKKVKSQADINMSLHELYARDGIHYELVENEGDYDSVCGCSPNGGGPPIFAK

SEQ ID NO: 3375 - protein, 162 aa, Brassica napus
MERQIINKRKRVFSLQEKKNPKAVFARRYVNHLVPALSKINMNKPSSQINSKTFEQTVKHEVDMALALSAREFAWSRFLQHKLLSPPHEDPSYSPKILETSICKQDGTEGAEIKKKLEELQKLVPGGEEMNMEEILSEVGSYIVCLELQMIVLKSLVQDNIS

SEQ ID NO: 3376 - protein, 239 aa, Pyrus x bretschneideri
MGRGRVELKRIENKINRQVTFAKRRNGLLKKAYELSVLCDAEVALIIFSNRGKLYEFCSSSSMLKTLERYQKCNYGAPETNVSTREALELSSQQEYLKLKARFEALQRNQRNLLGEDLGPLSSKDLESLERQLDMSLKQIRSTRTQCMLDQLTDLQRKEHMLNEANKTLKERLFEGYHALQLNANADEYGRQQAQAAQGDVFFHPLDCEPTLQIGYQNDPISVVTAGPSLSNYMGGWLP

SEQ ID NO: 3377 - protein, 219 aa, Pyrus x bretschneideri
FSKRRTGLLKKAHEISVLCDAQVALIVFSNKGKLFEYATDSCMEQILERYERYSYAERQLVEPDFESQGNWTFEYSRLKAKVEVLQRNHRHYLGEDLDSLNLKEIQNLEQQLDTALKQIRLRKNQLMHESISELQRKRKAIQEENNLLAKKIKEKEKAAAQPQVQNWEQQNHGLDLLPQPLPCLNNGGTQQDEFLQVRRNQLDLTLEPLYECHLGCFAA

SEQ ID NO: 3378 - protein, 384 aa, Arabidopsis thaliana
MEMMSSSSSTTQVVSFRDMGMYEPFQQLSGWESPFKSDINNITSNQNNNQSSSTTLEVDARPEADDNNRVNYTSVYNNSLEAEPSSNNDQDEDRINDKMKRRLAQNREAARKSRLRKKAHVQQLEESRLKLSQLEQELVRARQQGLCVRNSSDTSYLGPAGNMNSGIAAFEMEYTHWLEEQNRRVSEIRTALQAHIGDIELKMLVDSCLNHYANLFRMKADAAKADVFFLMSGMWRTSTERFFQWIGGFRPSELLNVVMPYVEPLTDQQLLEVRNLQQSSQQAEEALSQGLDKLQQGLVESIAIQIKVVESVNHGAPMASAMENLQALESFVNQADHLRQQTLQQMSKILTTRQAARGLLALGEYFHRLRALSSLWAARPREHT

SEQ ID NO: 3379 - protein, 262 aa, Zea mays
  misc_feature (90)..(90): Xaa can be any naturally occurring amino acid
  misc_feature (175)..(175): Xaa can be any naturally occurring amino acid
  misc_feature (240)..(240): Xaa can be any naturally occurring amino acid
  misc_feature (254)..(254): Xaa can be any naturally occurring amino acid
  misc_feature (256)..(256): Xaa can be any naturally occurring amino acid
  misc_feature (260)..(261): Xaa can be any naturally occurring amino acid
MSFLLKEKEMIIAAGIASMGRGRIEIKRIENNTSRQVTFCKRRNGLLKKAYELSVLCDAEVALIVFSSRGRLYEYANNSVKATIERYKKXHNAQQFYQQESAKLRNQIQMLQNTNRHLVGDSVGNLSLKELKQLESRLEKGISKIRARKSELLAAEISYMAKRETELQNDHMTLXTKIEEGEQQLQQVTVARSVAAAAAATNLELNPFLEMDTKCFFTGGPFATLDMKCFLPGSLQQMLXAQQRQMLATELNLXYXLAPXXS

SEQ ID NO: 3380 - protein, 184 aa, Oryza sativa (japonica cultivar-group)
MRVLVHSAESPATPAAAISIDSDMVVILASLLCALICVAGLALVARCACRRRGAATTTTTTTTTPAATSPAPKGLKKKAIDALPTVSFALKQQQQQAECAICLAEFAGGEELRLLPHCGHAFHVSCIDTWLGTHATCPSCRATVGTSTLFLPLPGRCRRCGEVDLPTLHDFSTATATAHHNTPP

SEQ ID NO: 3381 - protein, 241 aa, Eschscholzia californica
TDFQSQVTEDSSRRKMGRGKIEIKRIENTTNRQVTFCKRRNGLLKKAYELSVLCDAEVALIVFSTRGRLYEYANNSVKSTIERYKKTCADPSNSACASEANTQFYQQEATKLRQQIGILQNSNRNLMGEAISTMSVKELKQLENRLEKGISRIRSKKNELLFAEIEYMQKREIDLQNDNMYLRAKIADNERAQQQMSLMPGNEYEGMTSSGYDSRNFLQVNLLQSSSQHYSHQEQTTLQLG

SEQ ID NO: 3382 - protein, 805 aa, Medicago truncatula
MAACALFNGATTDETNNNSASNSSNISSEDLHTLHNSNTNMPQQQQPHSDRKVLRKRMASEMELQLQVHNNNNRFSRRNNNNISSLNCSLPSSTEKGVTTTTTTTLAAGTNNNANNNNFHYNTNNINNSSHHSNVALSRDNVAVQNYPTVTVTTNYSTMLLPSSSNNLNNSSTSNYAHFQQPLVEEQNHVPNICGFSGLPLFPSQNQPNRTSNRNSNSNISSATNIVDVVNSSTPSMMDETSATTNWIDGILKDLIHTSNSVSIPQLINNVREIIYPCNPNLALVLEHRLRLLTETAPSVVPERKRNNTEQQSVSNVNVLPASNVNSSVKLMNRVDDIVPHFSDSSTLLNQNQNMFPNWGVPQINNNNNPLVTLPSQPQSTQQDQHQHQQHQEHQEDLVPATTPPPPTSAELAITRKKKEEIKEQKKKDEEGLHLLTLLLQCAEAVSAENLEQANKMLLEISQLSTPFGTSAQRVAAYFSEAISARLVSSCLGIYATLPPHTLHNQKVASAFQVFNGISPFVKFSHFTANQAIQEAFDREERVHIIDLDIMQGLQWPGLFHILASRPGGPPYVRLTGLGTSMETLEATGKRLSDFASKLGLPFEFFPVAEKVGNIDVEKLNVSKSEAVAVHWLQHSLYDVTGSDTNTLWLLQRLAPKVVTVVEQDLSNAGSFLGRFVEAIHYYSALFDSLGSSYGEESEERHVVEQQLLSREIRNVLAVGGPSRSGEIKFHNWREKLQQCGFRGISLAGNAATQASLLLGMFPSEGYTLVEDNGILKLGWKDLCLLTASAWRPPFHTNNIIPHHN

SEQ ID NO: 3383 - protein, 163 aa, Oryza sativa (japonica cultivar-group)
MDRRRRRSRCRCSNSRAFRGVRKRPWGKFAAEIRDSTRNGVRVWLGTFDSAEEAALAYDQAAFAMRGSAAVLNFPMEQVRRSMDMSLLQEGASPVVALKRRHSMRAAAAGRRRKSAAPAPADQEGGGGVMELEDLGPDYLEELLAASQPIDITCCTSPSHHSI

SEQ ID NO: 3384 - protein, 359 aa, Arabidopsis thaliana
MDSLALAPQVYSRKDKSLGVLVANFLTLYNRPDVDLFGLDDAAAKLGVERRRIYDVVNILESIGLVARSGKNQYSWKGFGAVPRALSELKEEGMKEKFAIVPFVAKSEMVVYEKEGEESFMLSPDDQEFSPSPRPDNRKERTLWLLAQNFVKLFLCSDDDLVTFDSATKALLNESQDMNMRKKVRRLYDIANVFSSMKLIEKTHVPETKKPAYRWLGSKTIFENRFIDGSASLCDRNVPKKRAFGTELTNVNAKRNKSGCSKEDSKRNGNQNTSIVIKQEQCDDVKPDVKNFASGSSTPAGTSESNDMGNNIRPRGRLGVIEALSTLYQPSYCNPELLGLFAHYNETFRSYQEEFGREK

SEQ ID NO: 3385 - protein, 302 aa, Hordeum vulgare subsp. vulgare
MGRPSSGAVGQPKVRKGLWSPEEDEKLYNHIIRHGVGCWSSVPRLAALNRCGKSCRLRWINYLRPDLKRGCFSQQEEDHIVALHQILGNRWSQIASHLPGRTDNEIKNFWNSCIKKKLRQQGIDPATHKPMASADTATAAAALPDAEEEDRKPLCPAVDGSLVPKQPAVFDPFPLCVDYGAGFAEELGAANAAALYGQLCGGKEVADDDAGFGAADYSCVLDVSENLGYGESSSNSSNWNYGGEVGSVLDGEVPHWAKPEPAFAEMERQQQHSPAEQKLSLPCQEQSLLASFDFNLELEPYF

SEQ ID NO: 3386 - protein, 295 aa, Arabidopsis thaliana
MAEEFGSIDLLGDEDFFFDFDPSIVIDSLPAEDFLQSSPDSWIGEIENQLMNDENHQEESFVELDQQSVSDFIADLLVDYPTSDSGSVDLAADKVLTVDSPAAADDSGKENSDLVVEKKSNDSGSEIHDDDDEEGDDDAVAKKRRRRVRNRDAAVRSRERKKEYVQDLEKKSKYLERECLRLGRMLECFVAENQSLRYCLQKGNGNNTTMMSKQESAVLLLESLLLGSLLWLLGVNFICLFPYMSHTKCCLLRPEPEKLVLNGLGSSSKPSYTGVSRRCKGSRPRMKYQILTLAA

SEQ ID NO: 3387 - protein, 325 aa, Taihangia rupestris
MGRGRVELKRIENKINRQVTFAKRRNGLLKKAYELSVLCDAEVALIIFSNRGKLYEFCSSSSMLKTLERYQKCNYSTPETHVSTGEALELSSQQEYLRLKARYEALQRNQRNLLGEDLGPLNSKELESLERQLDMSLKQIRSTRTQCMLDQLTDLQRKEQMLNEANRSLKQRLFEGYNVNQLHQFQLNANAEDVGYGRHQQAHQPHSDVFYHPLELEPTLQIGYHQSDPIQVVAAGPSVSNFMGRMVAMILITRRRRRRRRENYHGCVGEPMDDDPWIHVMMDYISSSSCMFMLFDYVVLFDEFDKNNYLQFVIVGNYPIINSPH

SEQ ID NO: 3388 - protein, 345 aa, Oryza sativa (indica cultivar-group)
MAKRAGGARKKLRRGLWSPEEDEKLMNHIAKYGHGCWSSVPKLAGLERCGKSCRLRWINYLRPDLKRGAFSQEEEDLIIHLHSMLGNKWSQIAAQLPGRTDNEVKNFWNSYIKKKLRQRGIDPATHKPLAEVVAAAACARTPAVFSDAELILSSIGAQPPPESYMYYDGSRYSTECGAASVGGDGSLSSLSGYSQATAEFAVDGASASALLHCGGGGPTSSGGGAPPAPTAAVIPSVSSSSTLNSMVGLSPAATTTTTTTDEQYGNTNHLPWLELGPSTTTPSSSAAAATVDHYGAALDELKWSDYVFDGYNHQLPPYNHGGIYGGGDSKDTAVHFDAHALGNWC

SEQ ID NO: 3389 - protein, 969 aa, Oryza sativa (japonica cultivar-group)
MEAARVGAQSRHLYGGGLGEPDMDRRDKRLFGWDLNDWRWDSDRFVATPVPAAEASGLALNSSPSSSEEAGAASVRNVNARGDSDKRKRVVVIDDDDVEDDELVENGGGSLSLRIGGDAVAHGAGVGGGADEEDRNGKKIRVQGGSPSGPACQVEGCTADLTGVRDYHRRHKVCEMHAKATTAVVGNTVQRFCQQCSRFHPLQEFDEGKRSCRRRLAGHNRRRRKTRPEVAVGGSAFTEDKISSYLLLGLLGVCANLNADNAEHLRGQELISGLLRNLGAVAKSLDPKELCKLLEACQSMQDGSNAGTSETANALVNTAVAEAAGPSNSKMPFVNGDQCGLASSSVVPVQSKSPTVATPDPPACKFKDFDLNDTYGGMEGFEDGYEGSPTPAFKTTDSPNCPSWMHQDSTQSPPQTSGNSDSTSAQSLSSSNGDAQCRTDKIVFKLFEKVPSDLPPVLRSQILGWLSSSPTDIESYIRPGCIILTVYLRLVESAWKELSDNMSSYLDKLLNSSTGNFWASGLVFVMVRHQIAFMHNGQLMLDRPLANSAHHYCKILCVRPIAAPFSTKVNFRVEGLNLVSDSSRLICSFEGSCIFQEDTDNIVDDVEHDDIEYLNFCCPLPSSRGRGFVEVEDGGFSNGFFPFIIAEQDICSEVCELESIFESSSHEQADDDNARNQALEFLNELGWLLHRANIISKQDKVPLASFNIWRFRNLGIFAMEREWCAVTKLLLDFLFTGLVDIGSQSPEEVVLSENLLHAAVRMKSAQMVRFLLGYKPNESLKRTAETFLFRPDAQGPSKFTPLHIAAATDDAEDVLDALTNDPGLVGINTWRNARDGAGFTPEDYARQRGNDAYLNMVEKKINKHLGKGHVVLGVPSSIHPVITDGVKPGEVSLEIGMTVPPPAPSCNACSRQALMYPNSTARTFLYRPAMLTVMGIAVICVCVGLLLHTCPKVYAAPTFRWELLERGPM

SEQ ID NO: 3390 - protein, 249 aa, Taihangia rupestris
MGRGRVELKRIENKINRQVTFAKRRNGLLKKAYELSVLCDAEVALIIFSSRGKLYEFCSSSSSMLKTLERYQKCNYSTPETHVSTREALELSSQQEYLRLKARYEALQRNQRNLLGEDLGPLNSKELESLERQLDMSLKQIRSTRTQCMLDQLTDLQRKEQMLNEANRSLKQRLFEGYNVNQLHQFQLNANAEDVGYGRHQQAHQPHSDVFYHPLELEPTLQIGYHQSDPIQVVAAGPSVSNFMGGWLP

SEQ ID NO: 3391 - protein, 233 aa, Solanum lycopersicum
MKIQCDVCEKAQATVICCADEAALCAKCDIEVHAANKLASKHQRLHLQCLSNKLPPCDICQDKAAFIFCVEDRALFCKDCDEAIHSASSLAKNHQRFLATGIRVALSSSCNKESVKNQLQPQPPQQNSQQVGLKMPPQQLSCITSPSWPVDDLLGFPDYESSDKKDLLELGEFEWLGGIDLFGEQTAAEVPELSVPQSSNTNIYRTTKYQMPYKKSRIEIPDDDEYFTVPDLG

SEQ ID NO: 3392 - protein, 91 aa, Mimulus nasutus
  misc_feature (15)..(15): Xaa can be any naturally occurring amino acid
  misc_feature (18)..(18): Xaa can be any naturally occurring amino acid
ARGKIQIKRIENQTXRQXTYSKRRNGLFKKAHELTVLCDAKVSILMISSTQKLHEYISPSITTKQMFDQYQKAVGVDVWNTHYERMQEHLR

SEQ ID NO: 3393 - protein, 246 aa, Helianthus annuus
SYMSSCPFKKNEIFFANKTIYEAALSSSTLHIVDFGIAYGFQWPILIKHLGDRPGGPPKLRITGIEFPQPGFRPAEWVEETGRRLATYCERFKVPFEYNAIAIQNWEMINIDDLKLQRNEFLAVNALARFENLLDETMVTGSSPRDAVLKLVRDMKPDIFVHSIVNGSYSAPFFVTRFREALFHYSALFDMLDATIERENEQRQSYEGEFHGRQVMNVIACEGHQRVERPETYKQWQVRITRAGSN

SEQ ID NO: 3394 - protein, 243 aa, Ipomoea batatas
MGRGRVELKRIENKISRQVTFSKRRSGPLKKAHEISVLCDAEVGLIVFSTKGKLFEYSTDSSMENILDRYERYSYAEQRMTTNVSEQQQNWPCQYPKLVSRIELLQRSTRNFLGDDLEPLGLRELQSLEQQLDTGLKRIRTRKNQLMHESISELQKKERALQVQNNILAKQVELEQQKLVLNSASTSMPSQPLVSPLPLPNLTIGSIARATEAAKNSENRGQALPCSTSLVPPWMLRHPNNKD

SEQ ID NO: 3395 - protein, 301 aa, Oryza sativa (japonica cultivar-group)
MGRHACSAAGVQQKLRKGLWSPEEDEKLYNHIYRYGVGCWSSVPKLAGLQRCGKSCRLRWINYLRPDLKRGSFSQQEEDAIVGLHEILGNRWSQIASHLPGRTDNEIKNFWNSCLKKKLRQRGIDPSTHQPISTAAAAAAAALDTSTQDQKPPATADGFALKQQQQVFDPFPVIDSFGSGFDATGMPLYGHLGGKDAAGFVDYSSVLDVSENLGYGESSSNSSNWNCGVGAPEVNNALESEPLHWATESKVEPFVGYGEGDAMEHKFGLPCHGQQEQGMTHFDFDVSRSMVVGDFNFEYFR

SEQ ID NO: 3396 - protein, 554 aa, Medicago truncatula
MTMEPNPTSDHILDWLEGSVSFFPSFLDDPYNNGYIHEYEIWNQNQDISNQYQIDANTNSSNATNSTTNIVAASTTTSTTSLEPNSFNNIPFSDLPKKRNAEDELSLKKQPQNQKNKRLKSRPMNESDNGDAALEGTVVRKSGGNKKGAAKANGSNSNNGNNKDGRWAEQLLNPCAVAITGGNLNRVQHLLYVLHELASTTGDANHRLAAHGLRALTHHLSSSSSSTPSGTITFASTEPRFFQKSLLKFYEFSPWFSFPNNIANASILQVLAEEPNNLRTLHILDIGVSHGVQWPTFLEALSRRPGGPPPLVRLTVVNASSSTENDQNMETPFSIGPCGDTFSSGLLGYAQSLNVNLQIKKLDNHPLQTLNAKSVDTSSDETLIVCAQFRLHHLNHNNPDERSEFLKVLRGMEPKGVILSENNMECCCSSCGDFATGFSRRVEYLWRFLDSTSSAFKNRDSDERKMMEGEAAKALTNQREMNERREKWCERMKEAGFAGEVFGEDAIDGGRALLRKYDNNWEMKVEENSTSVELWWKSQPVSFCSLWKLDKQPE

SEQ ID NO: 3397 - protein, 228 aa, Solanum lycopersicum
MAGPSPPAVSAGAIQSPQAAGLAASSAQMAQHQLAYQHIHQQQQQQLQQQLQTFWANQYQEIEHVTDFKNHSLPLARIKKIMKADEDVRMISAEAPVVFARACEMFILELTLRAWNHTEENKRRTLQKNDIAAAITRTDIFDFLVDIVPREDLKDEVLATIPRGTLPVGGPTEGLPFYYGMPPQSAQPIGAPGMYMGKPVDQALYAQQPRPYMAQPIWPQQQQPPSDS

SEQ ID NO: 3398 - protein, 588 aa, Oryza sativa (japonica cultivar-group)
MGAMPAVKVEEEEEERNPVASSPSVSEGSAHAAALASPTAADSIFGRRRKSGPVRRAKGGWTPEEDEKLRKAVDIYNGKNWKKIEVQCLHRWQKVLDPELIKGPWTQEEDDVIINMVKKHGPKKWSVIARSLNGRIGKQCRERWHNHLDPQIRKEAWTVEEERVLARAHCMYGNKWAEIAKLLPGRTDNSIKNHWNSSLRKKIDDYNTRDILPVHPPVVGDGLKQLPKRPPADNHFDLNKEPIICSRDRLGVVHSDPTSHQRASNLKDFKGCADYLSLGQPVTSCEASAADDSAFDLATQGMRMDSVHDKGTGNNFVCGKVQGINFLGDKGLKINQISDKMGCSRQAKREGEAAINGGGSSLQSEAHSVGSLCYQIPKMEDIAPAQSPVFTANYVPEHSRNVMHSPNGYTTPPTHGKGSDQLSVESILRSAAEKFHGTPSILRRRKRDKPTPAEDNDLKIGRLSSDDFHTPIGKCTTDSPQSFKTAALLSLGPMDEQGSLDVSPPYRLRSKRLAVLKTVQNHLDFSSDEMSICDTTMKSACGNSDCANASSGVSSIQGKKLDEHMIGLETLTMNFAHTTKLDATQPNL

SEQ ID NO: 3399 - protein, 127 aa, Brassica napus
QVEFLSMKLATVNPQMDFNREGLLAKDALQLRAGTSSATPFPPNMPMVYPPLPHGFMQQTLSCMGRTVSSPLSPPINGGYKRQEANGWEGDLQNVIQINYGAGDVPPDSQAAATDASLPSSNMKVEP

SEQ ID NO: 3400 - protein, 360 aa, Oryza sativa (japonica cultivar-group)
MKIQCNACGAAEARVLCCADEAALCTACDEEVHAANKLAGKHQRVPLLSDDGGAAPAAAAPAVPKCDICQEASGYFFCLEDRALLCRDCDVSIHTVNSFVSVHQRFLLTGVQVGLDPADPVPPVADKHVKSAGGSVDSATKHLQRNPTDLSGENSASLPSQNVINGNYSRQSSVTMAKTGQVNWTMSNNTIRSIDPPPKYSSEESPALLLASHTSTMAAYSSQISKDSDRIYNLPFTGGNGSDSLHDWHVDEFFSNSEFGFAEHGSSKGDNAKPGSAGGSPQCRLAEGLFVEGLLGQVPDNPWTVPEVPSPPTASGLYWQNNLLCPSYDSTMFVPEISSLENSQNNFTVSAGLKRRRRQF

SEQ ID NO: 3401 - protein, 240 aa, Glycine max
MALEALNSPTTTAPSFPFDDPTIPWAKRKRSKRSRDHPSEEEYLALCLIMLARGGTTTVNNRHVSPPPLQPQPQPTPDPSTKLSYKCSVCDKSFPSYQALGGHKASHRKLAGAAEDQPPSTTTSSAAATSSASGGKAHECSICHKSFPTGQALGGHKRCHYEGNGNGNNNNSNSVVTVASEGVGSTHTVSHGHHRDFDLNIPAFPDFSTKVGEDEVESPHPVMKKPRLFVIPKIEIPQFQ

SEQ ID NO: 3402 - protein, 121 aa, Glycine max
ANSLMDCYSKGTNEVRRRSRFLRRRGRVRRLKYTWKSAAYHSIRKRITERKDQPLRQYNPMWFQSAWWKQCPCLSNETCWEKYWGCPKGLKNDFRACFWLKNMAKPPWPRFFAKGELDPNV

SEQ ID NO: 3403 - protein, 144 aa, Glycine max
MEKHQELSPISSSSSTSPSDFKLGDHNSNAHVKNACLLKTQRPSLKGGKEIKQHIYAFQTRSHVDILDDGYRWRKYGEKSVKNNKFPRNYYRCSYRGCNVKKQIQRHSKDEEIVVTTYEGIHIHPVEKSTESFEQILRNHHIYS

SEQ ID NO: 3404 - protein, 647 aa, Arabidopsis thaliana
MASSMASNDFQLPPRFFTVFVSHFSSEFMVIPVSYYDHIPHRFPKTVILRGPGGCSWKVATEIKDDEVLFSQGWPKFVRDNTLNDGDFLTFAYNGAHIFEVSIFRGYDACKEISEVTELEEEEEDSVISLSSEDTDTGAKSEMKNTVPEGRDKGKSKVEVVEDSDDDEEEDSVYSESSEETETDTDSEFKVAKPTIPKSQKKGKKKEQVVESSDDEEDEEEDSDSDYIETFGQLDIEENSISEEDSSYAPDKEDTATASFVKPKVANKVANLKRKEAAKKRKKVDPMIKNPERYLDDPKNIHFETNVKNRLYELLVHAQLVKDYCLRFGDYVNYIDRFGKLSAKTAKWKDQRVCIKRWMRICKRNKLKKEDRILCELLRKGTFVYAIKLHVIRAPTRYQKEQLSPEQELSVIVSALQHVISGENETAPCQGFSSDSTVISAGMPRLDSDTCQVCRIEGCLGCNYFFAPNQRIEKNHQQEEEITSSSNRRRESSPVAKKAEGGGKIRKRKNKKNGYRGVRQRPWGKFAAEIRDPKRATRVWLGTFETAEDAARAYDRAAIGFRGPRAKLNFPFVDYTSSVSSPVAADDIGAKASASASVSATDSVEAEQWNGGGGDCNMEEWMNMMMMMDFGNGDSSDSGNTIADMFQ

SEQ ID NO: 3405 - protein, 255 aa, Zea mays
MEQTRTGGAGEQPRGAPGEEPAKRIIVGGDAPASGTSGSGCFDCNICLECATEPVATLCGHLYCWPCIYEWLRPDVAESGARSSARRQCPVCKAAVSPDALVPLYGRGGSSSAKKPLASIPRPRRPALRQSTHDSGSGGHHHHHRHAETSTPARSLRHPAHAHAAQFDALLSAPFGDRGMLHSTTSTTGGMLGGMAVAVLPLVLRGQARVPGMYYPSPYHLMSPRQRRWHVEVERSLHQIWFFLCVFVVLCLLLF

SEQ ID NO: 3406 - protein, 686 aa, Ostreococcus tauri
MDVDDVPIDADRARTWEDLLERALRDEGAAEAAVRTSDGFRSTHSSAKTESTGGGGTTTPRTFLRKGARSARTSPLTPKTTPRVESARAKVGSRSGGGGAATTSRGTPGANGTPRETSGRTMKASPRGRGLFEFDQDANVQPSTMEAWRAHKVRSASEVEAFEALELRARNGTRRDGEAATSATTRTMRASDGVDGGAVVRDFISSPSAEEQKARAAFEQAKANLTQSERRFAEEKAAWRAQRDAAEEAFKAECDDVRRQFRREKAALMREMETRMAMPTKEERNESKFLREQLERNEEEFKAERKRAKLTVDRLRQQIVDLTNEVSQLRMEKRAIEEKREVAERLREQATTTHTPPRRAEPAFESPGRSMVSLSPKPPVSESLMSIVPRALSVYDPTPSVSTAQSANAGAMREREHDDGRVERSFADGRRVVTFPNGTCKEIVQRSPDEVMETIYFVNGDVKRTHPGGTIEYYYSDVETWHTTHPSGDELYHFVATDQVELHRARGSSSGVEKEILFPDGTLRRIHVDGREEDVDPSPRLIFAPPRSMSCDRRTRSSARKSPRTGESLHMLSKAVSRYHASGRAIEALSKETVGKDMLIPLTESLYVPGKIAKTNGVLLDVGTGYFIEHDAEKGIDYCKRKVNFIRENVDALMELLTKKRKQLVLVQDFMRARMQEQAQATQAGA

SEQ ID NO: 3407 - protein, 134 aa, Oryza sativa (indica cultivar-group)
MASPPRIEVEKLSVEQLKALKEQTDLEVNLLQDSLTKIRSAATRLENASAALHDLSLRPKGTTTTTRLPPSALRKKMLVPLTASLYVPGTLDDSEKVLVDVGTGYFIEGQRQGGGQQWLALPIVSIFALYLLEF

SEQ ID NO: 3408 - protein, 180 aa, Triticum aestivum
  misc_feature (25)..(25): Xaa can be any naturally occurring amino acid
  misc_feature (68)..(68): Xaa can be any naturally occurring amino acid
  misc_feature (74)..(74): Xaa can be any naturally occurring amino acid
  misc_feature (111)..(112): Xaa can be any naturally occurring amino acid
  misc_feature (115)..(116): Xaa can be any naturally occurring amino acid
  misc_feature (118)..(118): Xaa can be any naturally occurring amino acid
  misc_feature (133)..(133): Xaa can be any naturally occurring amino acid
  misc_feature (137)..(137): Xaa can be any naturally occurring amino acid
  misc_feature (139)..(139): Xaa can be any naturally occurring amino acid
  misc_feature (141)..(141): Xaa can be any naturally occurring amino acid
  misc_feature (152)..(152): Xaa can be any naturally occurring amino acid
  misc_feature (166)..(166): Xaa can be any naturally occurring amino acid
MGRGKIEIKRIENTTSRQVTFCKRXNGLLKKAYELSVLCEAEIALIVFSARGRLYEYASNSTRTTIDXVPEVLXASASGSAPAIDVNSQQYFQQESAKLRHQIQSLQNADXXLMXXNXVGNLTLKELKSLENXLDKXHXAXIRAKKHELLFXEIEYMQKLEADLQXENMYLRAKVAGRGG

SEQ ID NO: 3409 - protein, 363 aa, Genista tenera
SGPYPYRYPYFPSSSSSYHPFAFFNPENASSNNTFSHDPLSVPYNIPTTHHHHHAPIPDTLSNFADYAASAAMFKSDDSGSNFGFSNLLTKKPAPKKDRHSKIHTSQGLRDRRVRLSIDISRKFFDLQDMLGFDKASNTLEWLFNKSKKAMKELAQSKNSGSGVVANGFSSSDSECEVVSMINQDSIDATPEGLVLDSKERKIKRAKMKESREKARARARERTNNKMYNTSGMKKKCPETENLQMFHQLRSPFHHPENSARSPNNKLVPSHHHHHSQLVCNEIPRDDFNVIEKSIVIKRKLKQSLMSSSHCHQNHVIPKETSLNNNTEHHSFPILSPNWDANNGDNGKSNFCAIASMNLSTGM

SEQ ID NO: 3410 - protein, 267 aa, Hordeum vulgare
MGRSPCCEKAHTNKGAWTKEEDDRLTAYIKAHGEGCWRSLPKAAGLLRCGKSCRLRWINYLRPDLKRGNFSHEEDELIIKLHSLLGNKWSLIAGRLPGRTDNEIKNYWNTHIRRKLTSRGIDPVTHRAINSDHAASNITISFESAQRDDKGAVFRRDAEPAKAAAAAAAISHHVDHHHRSNPQLDWGQGKPLKCPDLNLDLCISPPIHEDPMVDTKPVVKREAGVGVGVVGLCFSCSMGLPRSSDCKCSSFMGLRTAMLDFRSIEMK

SEQ ID NO: 3411 - protein, 284 aa, Oryza sativa (indica cultivar-group)
MEADASHTPTTSSSVSVSFSSSSLSTSSSTSSLVDNGAQDRPKSSKPKHAAKKRKRAAAEEPANAAHGAGEDTSSCSTDDNAAASGKAQAGGGGGGVDSSSTCTAASAPRSGFKHPSYRGVRRRSWGKWVSEIREPRKKSRIWLGTFPTAEMAARAHDVAALAIKGRNAHLNFPDSAHELPRPASTSPADIQAAAAKAAAEVRCEEESSPSSSPTAEQPEEEAACPDTVHADGGQDNALFDLPDLLLDLRDGLWWSPVWPAALAAEEYDGGDAVVLNEPLLWAE

SEQ ID NO: 3412 - protein, 243 aa, Populus tomentosa
MGRGRVQLKRIENKINRQVTFAKRRNGLLKKAYELSVLCEAEVALIIFSNRGKLYEFCSGSSMLKTLERYQKCNYGAPEPNVSAREALELSSQQEYLKLKARYEGLQRTQRNLLGEELGPLSSKDLESLERQLDMSLKQIRSTRTQYMLDQLNDLQHKEHMLTAANKSLKERLMEGYQLNSLQMNPSAEDVEYARQQAQPQPGDGFFHALECEPTLQIGYQPENITMVTAGPSMTTYMPGWLA

SEQ ID NO: 3413 - protein, 323 aa, Zea mays
FCPPDVAANDSDSLWLQCDDIDMDMDMAQLEWLSGLFDDASIPHEPAFPGAAPIIKSSALAAGALLPPDKMEDALLFRSSSPISVLEHGSFNNANGGGGGCSASSESSSASSSSESFSGSGSGSGEGHAWSAPVSPPPVLVIPARARSKRSRPSAFTRAGAEAPTILVPTPMYSSGPSHSDPESIAESSPHPAPPMKKKKKAKKPPAPPAPASSDDNDGDADYEEGGERAEPQGGAVRRCTHCQIEKTPQWRAGPLGPKTLCNACGVRYKSGRLFPEYRPAASPTFVPSIHSNSHKKVVEMRQKAVRSGDPSCDLLQFIRRRD

SEQ ID NO: 3414 - protein, 508 aa, Arabidopsis thaliana
MENSENVPSYDQNINFTPNLTRDQEHVIMVSALQQVISNVGGDTNSNAWEADLPPLNAGPCPLCSVTGCYGCVFPRHEAIIKKEKKHKGVRKKPSGKWAAEIWDPSLKVRRWLGTFPTAEMAAKAYNDAAAEFVGRRSARLNGTDNCRYSSSLATKGVGHLARKGTGGRSSVSGIVATVFGATGFLGRYLVQQLAKMGSQVLVPFRGSEDSPRHLKLMGDLGQVVPMKFDPRDEDSIKAVMAKANVVINLIGREYETRNFSFEDANHHIAEKLALVAKEHGGIMRYIQVSCLGASVSSPSRMLRAKAAAEEAVLNALPEATIMRPATMIGTEDRILNPWSMFVKKYGFLPLIGGGTTKFQPVYVVDVAAAIVAALKDDGSSMGKTYELGGPDVFTTHELAEIMYDMIREWPRYVKLPFPIAKAMAAPRDFMVNKVPFPLPSPQIFNLDQINALTTDTLVSDNALKFQDLDLVPHKLKGYPVEFLIQYRKGGPNFGSTVSEKIPTDFYP

SEQ ID NO: 3415 - protein, 217 aa, Oryza sativa (indica cultivar-group)
MDDSHDLASPTSPDTASSSSSSTSTSSSSATVAPKKRPRNDGRHPTYRGVRMRSWGKWVSEIREPRKKSRIWLGTFATAEMAARAHDVAALAIKGRTAHLNFPDLAHLLPRPATAAPKDVQAAALLAAAAADFPSVSVDANAKSPENCSVASAASPQPPPPDAEADPDSTLFDLPDLLLDLRYETSSSLSCGASWAVDDDVAGGVVFRLEEPMLWDY

SEQ ID NO: 3416 - protein, 515 aa, Zea mays
MELAGAASPHPPPESHVAPPRPPPQPPEEDLCEDRGDMSVTGEKPCTHRESDVGQTNSCSLNNSSECENHTPSNDEISEPESNLEMAKTDQGGDVPSGEKVLKKPDKILPCPRCNSMDTKFCYYNNYNIKQPRHFCKSCQRYWTAGGSMRNIPVGAGRRKSKSSSASCRSVLIPVPGSSSVANPGGEASLFPLSVKANQAAVSFGPDSPLCTSMASVLKIGGGGEQVKSCSPASAAAQPRNGETQTQTCAPSSAATTPSDGPGNGLQKGAESAHQNQNQNQNGIIGHSNGVTPVHPIPFFPGPPFVYPWSPAWNGIPAMAAAVCAAPATAEAAISSEHGTASSTVQWNVPPAIVPVLPPGFCGPIPVPVIPPPSVWPLITPWPNAAWSAPWLGPSASVPPGSSRSSGSSTCSDSGCGSGSPVLGKHSRESRPQGDEKAERRCLWIPKTLRIDDPVEAAKSSIWTTLGIEPGDRGMFRPFQSKHGRQQELQASGAARALQANPAALSRSQSFQETT

SEQ ID NO: 3417 - protein, 429 aa, Triticum aestivum
  misc_feature (280)..(280): Xaa can be any naturally occurring amino acid
MGRHSCCYKQKLRKGLWSPEEDEKLMNHITKHGHGCWSSVPKLAGLQRCGKSCRLRWINYLRPDLKRGAFAQDEEDLIVELHAVLGNRWSQIAAQMPGRTDNEIKNLWNSSLKKKLRQKGIDPNTHKPLTEADRSGAAPTISTERTSGSSDVNPSSAGAQGNFGHLLSETAQSSMLLPVYDKKHPETPSLARPKVAAKELSLDQLTAGHESPSSCRSSGPTLEFPFQEQLGYSHEWGRGDGANMNSLWFNQNDFSCNTISTVMPTVSPSSPLDADGTEPXQDNHHHGGTGIGSAPFYWDGVNPSSSGSTGSSGSNSMGFEPQSTNSILENSVFPWTDIGVGQEKDTRVQLVEELKWPDLLHGTFAEATTAMQNQSQSLYDDVIKAESQFNMEGICASWFQNQQPQQQLQAASDMYDKDLQRMPLSFEHI

SEQ ID NO: 3418 - protein, 242 aa, Glycine max
MEFPNEAIPEGCSQKKTGRGKIEIKRIENTTNRQVTFCKRRNGLLKKAYELSVLCDAEVALVVFSSRGRLYEYANNSDLGTIDRYKKACAASTNPESVSEANTQFYQQEASKLKRQIRDIQNLNRHILGEALSSLSLKELKNLESRLKKGLSRVRSRKHETLFADIEFMQKREIELQNHNNFLRAKIAEHEKAQQRQQDMIPGNVCESTIPPQSYDRNFFPVNLIDSNNQYSNQDQTALQLV

SEQ ID NO: 3419 - protein, 175 aa, Betula platyphylla
MNLGKVDGSCYQKMVKKEAEEDQVSDEELVESGVEEEKKKKGVVGSGGKRCCQAEKCTADLSDGKQYHKRHKVCEHHAKAQVVLVGGMRQRFCQQCSRFHELSEFDETKRSCRRRLAGHNERRRENTAESHAEGSSRKGTGTHQLKDIVCGQVDDRGRIQITIHENSTYKHFQIR

SEQ ID NO: 3420 - protein, 326 aa, Glycine max
MAAGTVFCAAATAASNLTTTTFLHNQTPPSTSSQPPLDSLFLSASSPFLGSRSIVSFGDVQGGKGCNDSFFRPYDENGDEDMDEYFHQPEKKRRLSVEQVKFLEKSFDEENKLEPERKIWLAKELGLQPRQVAIWFQNRRARWKTKQMEKDYDSLQASYNDLKANYDNLLREKDKLKAEVARLTEKVLGREKNESHLEQAETNGLQEPLHKSLVDSASEGEGSKVTFEACKQEDISSAKSDIFDSSESPQYTDGVHSALLETGDSSYVFEPDRSDVSQDEEDNLSKTLLPHYIFPKLEDVDYSDPPHGSCNFGIPEEDQAIWSWPY

SEQ ID NO: 3421 - protein, 316 aa, Triticum aestivum
MKRQIKRPTRSQESPEPGEKLAFAEKENLLAAYMEHDEPELEEADEEEEEEERAMSCGLGGKKRRLALEQVRALERSFETDNKLDPERKARIARDLGLHPRQVAVWFQNRRARWKTKQLERDFNALRARHDALRADCDALRRDKDALAAEIHELREKLSTKPETAVKAEAAGNVDAAEERLQQATMVGAAVCKDGSSDSDSSAVFNDEASPYSSAVFEQQGFMGFGASFLDSASAAAATTGCSSLPMLEPKWPGAYPYDASRSGGYGFTEEWLAGSDAIVNDGSSAFFSEEHVSNLNFGWCSSGAEGFDLQSYCKK

SEQ ID NO: 3422 - protein, 265 aa, Emericella nidulans
MEQAQQTSGQQQGRQQPVYDTRQGGHYGASAALAAQGFAPVAELYTGTWANVNQGLQGTARDILTTYWQHVINHLESDNHDYKIHQLPLARIKKVMKADPEVKMISAEAPILFAKGCDVFITELTMRAWIHAEDNKRRTLQRSDIAAALSKSDMFDFLIDIVPREEATSHAKRSSQSAGAPAGPGGPTAAGQLPQTQHGVQHHPHHMAPPDYGALGQHPLQDQEYRQQTMYGGAVQSDPTAAYAQPQTQMFEGMYTAYPHLPPQQ

SEQ ID NO: 3423 - protein, 268 aa, Oryza sativa (japonica cultivar-group)
MGRGPVQLRRIENKINRQVTFSKRRNGLLKKAHEISVLCDADVALIVFSTKGKLYEFSSHSSMEGILERYQRYSFDERAVLEPNTEDQENWGDEYGILKSKLDALQKSQRQLLGEQLDTLTIKELQQLEHQLEYSLKHIRSKKNQLLFESISELQKKEKSLKNQNNVLQKITTKAVLEVKPFCLHSSEQLMETEKEKNNAIINTNREEQNGATPSTSSPTPVTAPDPIPTTNNSQSQPRGSGESEAQPSPAQAGNSKLPPWMLRTSHT

SEQ ID NO: 3424 - protein, 321 aa, Tulipa gesneriana
MAAFSYKQQQHQSNLLLDSTDHHHLSFQFQDLMTNSTSPFLYYPMPTSATNSTLDSASDNQKDCSSSVAEPQSSTEIRKRKDKSDGSCMTSVQSKGTKRETKSRKSQKKPKANESDEMKERTQEEEEAPVGYIHVRARRGQATDSHSLAERVRREKISERMKLLQALVPGCDKVTGKAVMLDEIINYVQSLQNQVEFLSMKLATVSPMLYEFGLDIEGQMNDLERVGSFPQDSQLLVPKTIPFQHRVCEEDTRSYSIGETSAPFLLHDQGPLSFSGVPFSVEMGTKHKAFSVNFCSTTSHLPTIENRRADKGRWGYGRKST

SEQ ID NO: 3425 - protein, 323 aa, Glycine max
MGTQTMGTHGGGGDSNGKQSPLQPLVRQNSMYSLTLDEVQNQLGDLGKPLTSMNIDELLKNVWTAEASQTIGMDNEGTAQASQASLQRQASLSLTGALSKKTVDEVWRDIQQNKIVGEKKFQDRHPTLGEMTLEDFLVKAGVVAGASSNRTNTSTIAGVDSNVAVPQFPSQAQWIQYPQAQYQHPPQSLMGMYMPSQGMVQPLHMGAGASLDVSFADNQMAMPSSLMGTMSDTQTPGRKKSTSEDMIEKTVERRQKRMIKNRESAARSRARKQAYTNELENKVSRLEEENERLRKRKELEQMLSCAPPPEPKYQLRRIASAPF

SEQ ID NO: 3426 - protein, 264 aa, Oryza sativa (japonica cultivar-group)
MELELSLGSANSEMCTRGFDVNTRPADGGAEAGRPSSPSSMQEASTRQQVADQEAADDEDNGGGGARKKLRLSKEQSSFLEDSFKEHSTLTPKQKSDLANRLNLRPRQVEVWFQNRRARTKLKQTEVDCEHLKRCCERLTRENRRLQREVAELRGTLRTTTSSYPPLYGLHHLPAAAGTVFRVCPSCEHSKVVAAAASESFSPRVFAGGGAPAAITAAAAVPSPGAGSPPSSSAALFGARRPHFGPFAAAVIPPVLRRQPSATS

SEQ ID NO: 3427 - protein, 172 aa, Antirrhinum majus
KATELRLGLPGTDESEPQTSSSIKNNNNKRSSSEMQGSCQKSTQQEESIAPAPKAQVVGWPPVRSFRKNVMKASESDGSGMFVKVSMDGAPYLRKIDLKFYNNYFDLLKALENMFKCTIGVYSEREGYNGSEFAPTYEDKDGDWMLVGDVPWDMFITSCKRLRIMQSKLCCL

SEQ ID NO: 3428 - protein, 338 aa, Zea mays
MDPRFPPPAPSSCFGGGGELPARGHHRRAHSETFIRLPDADLLLDPDADFGFSDIDFPSLSDDSPAASDPTPQPQAPPLQPPLQQAASPASAAPPRPPSGAHMRSLSLDAAFFDGLSLQGGGGGGGVRGGMAGHKRSGSMDGDTSPFEGESAPPSVLPDYAKKAVPDDKLAELALLDPKRAKRILANRQSAARSKERKIKYTSELERKVQTLQTEATTLSAQLTLLQRDTSGLTTENRELKLRLQAMEEQAKLRDALNDALREEVQRLKIAAGQVPNMNGNPFNGGLSQQQQMPSYFSQPQQMQYFSGHQGQHHHPKHDPQNSSNGGGQPLSDSMDFM

SEQ ID NO: 3429 - protein, 435 aa, Glycine max
  misc_feature (335)..(335): Xaa can be any naturally occurring amino acid
  misc_feature (337)..(337): Xaa can be any naturally occurring amino acid
  misc_feature (363)..(363): Xaa can be any naturally occurring amino acid
MNGLEESTNDEVDVPLNEVSSKQIDPQEDGNSAPNIYKNPTLKLVAKVVNGNNEHRNAKRDIDHQEKVLKRANKVLPCPRCNSSETKFCYFNNYNVNQPRHFCKNCQRYWTAGGTIRNVPLGAGKRKNKHSTLQYCLIPVTPDAASVSQTDSKPASDMLLSSSRLIKGMENISSLREETPLSESLETVLSLNGQTNIEMASSTLKDDAEESSSSSMRSNEVEQVCLAQHSLVPLQSFQYYPVPSWSYQWNPCWNVKELRPRSLSSRPVYTGSPTMIAVPGFSLPTVILPGVPYSYSGFMSNWDEQKEDASLVGSAFSGISLSPSSVSNSTCSGNXGXPTLGKHSRDGSTLGEDAMKQNLWVPXTVRINDPEEAANSSIWSTLGTKSEQNKLIMKGSIFKSFEPKASASSHILEDNQILRANPAAFSRSESFQESM

SEQ ID NO: 3430 - protein, 303 aa, Zea mays
MDTGRKRIAPGGANGAGGPKRARESETTQMGVGSKTKPCTKFFSTAGCPFGSNCHFLHNFPGGYLAVSKMTNLGGPPVPAPPGRMPMGPGGPDGPPSPALKTRLCNKYNTAEGCKWGSKCHFAHGERELGKPLQMDNSMGAPPMGPGPNGHFMPPPMPIPDMVPHSTFGASATAKISVDASLAGAIIGKSGINTKHISRVTGAKLAIRDNEADPNHKNIELEGTFDQIKHASAMVTELIVRISGKVPPQAKNNPGRGPGSHAGGPASNFKTKLCENFNKGSCTFGDRCHFAHGESELRKPAAA

SEQ ID NO: 3431 - protein, 197 aa, Triticum aestivum
MKVLCSACEAAEARVLCCADEAALCARCDRDVHAANRLAGKHHRLPLLSAASNPPAVSAPNCDICQEGHAYFFCVEDRALLCRSCDVAVHTANAFVSAHRRFLLTGVQVGLEPDEQEEPVPEPEPEPQPPNNASSAPLPPPMCHRKRSPTPLYSDGDHSTGRPARTSASPGNLPDWSVIDEQFGSATPAIEARGARR

SEQ ID NO: 3432 - protein, 302 aa, Triticum aestivum
  misc_feature (227)..(227): Xaa can be any naturally occurring amino acid
LSRTSLYKKAGSYRSGIPGIPSTHASVHPRDEELVLDYLLHKLTGRRAYGGVDIVDVDLNKCEPWDLPEAACVGGRKRYFFSLRDRKYATGQRTNRATRSGYWKATGKDRAILAHGAGDALVGMRKTLVFYQGRAPKGTRTEWVMHEFRLEEERHRHHQQQKVGAATAEARCQLKEDWVLCRVFYKSRTTSPRPPSDEACTFFSELDLPTMPPLAPLINAYIAFDSXAPPMNTIEQVSCFSGLPALRLRRSMSFGDLLGWDNPEKKAIRTALSNMSSNSNSKLELTPNWSQENGLSQMWTPL

SEQ ID NO: 3433 - protein, 169 aa, Oryza sativa
VERARALERKKVKGKDPDDDHDGGGDGDEDDEEEADQQVDEEDDGASGDTTRAGSKKRRRKAAAAARRTGSTGGVEGEVEAMLREFMRRQIEMEERWMEAAEAREAERRAREEEWRTAMVALGEERLALVRRWREREDAWRARAEEREERRHQLVAALLAKLGAGDASA

SEQ ID NO: 3434 - protein, 234 aa, Brassica napus
DFSSYAKRRSELTDKSCSSYFAPSWNSSLENGLLWMGGCRPSSFVRVIYALCGSCAEAHLSRYLLQIDENIDDGHDGDSSMSDLTATQLEKINDLHVKVIREEDKLTKKYANFQEDVADMPIAVNAFWRDSVEADVAVEDALDKHEECMGVLMAEADKVRVETLKRIVEVLTPVQAAEFLLSGKRLHVSLHEWGRAREERRFGCVHVRRLLPRLPAPLGRRRDQPLVDVCVRVL

SEQ ID NO: 3435 - protein, 271 aa, Zea mays
MGRGKVQLKRIENKINRQVTFSKRRNGLLKKAHEISVLCDAEVAVIVFSPKGKLYEYASDSRMDKILERYERYSYAEKALISAESESEGNWCHEYRKLKAKIETIQRCHKHLMGEDLESLNPKELQQLEQQLESSLKHIRSRKSHLMAESISELQKKERSLQEENKALQKELSERQKAVASRQQQQQQVQWDQQTQVQVQTSSSSSSFMMRQDQQGLPPPQNICFPPLSIGERGEEVAAAAQQQLPPPPGQAQPQLRIAGLPPWMLSHLNA

SEQ ID NO: 3436 - protein, 189 aa, Zea mays
MNTVSGTKRAPRRQSQDGSGDKLVVIVEASSRGVGSRRGPHAPIPGALNSPIDVEAIEDEVQARRNRRTRREPITVVDLEVEASREGSKRQRVEPVGRHLYPDWGARSSLQSNAVQTSKEPAKEVPEEPSFTCPICWNKMEEPSTTTCGHVFCDTCIKQAIKVQKKCPTCRKGLKMNSVHRIYLPNGSS

SEQ ID NO: 3437 - protein, 205 aa, Eucalyptus globulus subsp. globulus
MVRGKTQMKRIENDTSRQVTFSKRRNGLLKKAFELSVLCDAEVALIIFSPRGKLYEFSSSSLCKTIEKYQTRAKDMEAKTAEISMQPSKGNTLDMEKKIEHFEISRRRLLGEGLDSCSVEELQQTENQLERSLTKIRARKNHLIREHIERLKAEERKLLEEKRKLLQEIECGKGLTPVSSERPREEIRAESMDVETELFIGPPKR

SEQ ID NO: 3438 - protein, 302 aa, Zea mays
MGCKACDKPKPNYRKGLWSPEEDQKLRDYILLHGHGCWSALPAKAGLQRNGKSCRLRWINYLRPGLKHGMFSPEEEETVMSLHATLGNKWSRIARHLPGRTDNEVKNYWNSYLKKRVEAKDQGPSTPAPAASNSDDDSHCVKQRRDDGDTAAGANGPADSGASEPRESSSADDSSCLTDPHACRPHAPVPPKVMFADWLDMDMDYVGGALPSTAPAAPGLLGAAGVATASTGDRDRDQHQVMSMSQGSVQVDGPSGADVSLHGFGDSGAGCWEFQEHFDAIDHMQAAGFCDLLSMTDYFGLD

SEQ ID NO: 3439 - protein, 397 aa, Brachypodium sylvaticum
MSGTGKRGALTEDWMLPTPSPRTLMLSLFNDDLSSGPCSDAFGDNKPQDGIDGGKPCLVDSSWEETTQVAEAPPHFEPNLFGAKEKPISGNSLAERMAPGNGLCALQIDTSRVGSSASIWSPVVIPPGVSPRELLESPVFLPNAIAQPSPTTGKLPFLMRANANLAIPSVHKKDEDLSSRDGCTIFFQPILRPKPPIFPTTNKPSVGDNRQDLSLQSSSTATKDVTGTTSVKPKKLDSMFDNNHPIPIPDNEQEECDADRDGNYSLAPAIAAEDGYNWRKYGQKQVKNSDHPRSYYKCSHPNCPVKKKVERCQDGHITEIVYKGSHNHPLPPPSHHFQDVHGEVLGTKLSASLNTADQLAHISETREAVDISPVLSNEDDNKGTHGTVSLGFDGGGD

SEQ ID NO: 3440 - protein, 246 aa, Helianthus annuus
SYMSSCPFKKNEIFFANKTIYEAALSSSTLHIVDFGIAYGFQWPILIKHLGDRPGGPPKLRITGIEFPQPGFRPAEWVEETGRRLATYCERFKVPFEYNAIAIQNWKMINIDDLKLQRNEFLAVNALARFENLLDETMVTGSSPRDAVLKLVRDMKPDIFVHSIVNGSYSAPFFVTRFREALFHYSALFDMLDATIERENEQRQSYEGEFHGRQVMNVIACEGHQRVERPETYKQWQVRITRAGSN

SEQ ID NO: 3441 - protein, 366 aa, Zea mays
MKRSRGSTRNSTTSRCTRTSRRRLKKLLVVRRESRGMGKSGSVRLSSCPVRKTRVKTSSSSGNNYFTWVNFKEVSNTLGAKWKALGAEEKQPYEERYRQEKEAYLQVVGQEKREAEAMKLLEEQQMQWTAKELLDQYLKFRQEAEEGDCKKGRKKKSKKDKDPSKPKQPMSAYFVYSQERRATLVAEKKNVPEIGKITGEEWKNMTEGQRAPYEEVARKQKEEYHKQMEVYKQKKAEEAASLEKEEQEHKKIMKHEALQLLKKKEKADNIIKKTKEKRQKKKQENADPNRPKRPASSFLLFSKEERKQLIEERPGINNSTLNALITVKWKELSGEERQAWNAKAAPAMAAYKKEMEEYTKAQSSSA

SEQ ID NO: 3442 - protein, 925 aa, Oryza sativa (indica cultivar-group)
MEPKSSASAAHQGGDAPAEAPRRRGGGGKRKSGGSSFTPSKRHAKERNAAFHVPPHLLHSGPLTRAARQSPHKLAEEAAAAAAAGTGGSEAGGGKGGGDVIRLEGEEAPTEETPLVDEVFEAVRSRGAGVHVVPTFAASVYQVTPVTVFCRIYLCITPQFPMIYESCLFKLQLESKDLAELSIGEADAHQEVLKFLDHWGLINFHPFLPAGQEESKPEEAHGKSHSEEKASVLEQLFKFESVQSYMIPLPKKGEVETPAPLPSLLPDPALIEDVVSAAEPSVEYHCNSCSVDCSKKRYHCRTQADFDLCSDCYNEGKFDIGMAKTDFILMDSSEVSGASGTSWTDEETLLLLEALEIFGGKWTEIAEHVATKTKAQCMLHFLQMQIEDRFHGDEDINQNIQENTEQASAEKGAAEIPDKMEVEEKAEGKDTAGEKTPEKAEGNSVEAQTEDGNAIENKDANNSGGTDSVKSLNTDEPKKSSDADPPKSSSDAEPVVKENSVDVDTSRENASNFAIDTLKSAFEAVGYFPEHEGSFADAGNPVMALASFLAGLVEDDTATNSCRSSLKAISEVSPALQLATRHCFILEDPPSDVKDMSGNASTTSTDGDKRKDKDKTQDSIDSEVEGINKKGETVLSVEGKKSSPISPKGQDTDKKDECDEDPSVDPKHNNGKESDDPVSLDKSVSNNKKGNTMETSNPEMIEDKASSEVNPADDSSLEGKVEMKKTKDAVANATTAQEQKQSQILENGKMEGNANTAKMVKTVNFNSGPLTYDTCPAEPKSTEDVAADEENSSRVTANLTDSITRLKRAAATAISAAAVKAKLLADHEEEQIRQLAALMIDKLYRKVEAKVSFLTEVEHLVQRTREYTEKTRKKLLMERNAIIAARMGSLPSRPNQPGAAGNRLPAGYGGPIVRPPPNAMPRPSS

SEQ ID NO: 3443 - protein, 199 aa, Solanum demissum
MVGKISSDLPPGFRFHPTDEELIMYYLRYQATSRPCPVSIIPEIDVYKFDPWELPEKAEFGENEWYFFTPRDRKYPNGVRPNRAAVSGYWKATGTDKAIYSANKYVGIKKALVFYKGKPPKGVKTDWIMHEYRLSDSKSQTYSKQSGSMRLDDWVLCRIYKKKNLGKTIEMMKVEEEELEAQNIYIYTMYFSDKGIPSR

SEQ ID NO: 3444 - protein, 204 aa, Arabidopsis thaliana
MQDPAAYYQTMMAKQQQQQQPQFAEQEQLKCPRCDSPNTKFCYYNNYNLSQPRHFCKSCRRYWTKGGALRNVPVGGGSRKNATKRSTSSSSSASSPTNSSQNKKTKNPDPDPDPRNSQKPDLDPTRMLYGFPIGDQDVKGMEIGGSFSSLLANNMQLGLGGGGIMLDGSGWDHPGMGLGLRRTEPGNNNNNPWTDLAMNRAEKN

SEQ ID NO: 3445 - protein, 322 aa, Oryza barthii
VVATADPSAADSARDTKRMRTGGGSTSSSSSSSSSLGGGASRGSVVEAAPPATQGTAAANAPAVPVVVVDTQEAGIRLVHALLACAEAVQQENFAAAEALVKQIPTLAASQGGAMRKVAAYFGEALARRVYLFRPADSTLLDAAFADLLHAHFYESCPYLKFAHFTANQAILEAFAGCRRVHVVDFGIKQGMQWPALLQALALRPGGPPSFRLTGVGPPQPDETDALQQVGWKLAQFAHTIRVDFQYRGLVAATLADLEPFMLQPEGEADANEEPEVIAVNSVFELHRLLAQPGALEKVLGTVHAVRPRIVTVVEQEANHNS

SEQ ID NO: 3446 - protein, 131 aa, Zea mays
IKAPKQASGEHKKKKKIKVTFPSGQERNAPSQAIRKCLHCEITKTPQWRAGPMGPKTLCNACGVRYKSGRLFPEYRPAASPTFCAAMHSNSHKKVLEMRNKTGTKSGFATVSAASPELIPNTNSSLTLEYM

SEQ ID NO: 3447 - protein, 322 aa, Oryza longistaminata
VVATADPSAADSARDTKRMRTGGGSTSSSSSSSSSLGGGASRGSVVEAAPPATQGAAAANAPAVPVVVVDTQEAGIRLVHALLACAEAVQQENFAAAEALVKQIPTLAASQGGAMRKVAAYFGEALARRVYLFRPADSTLLDAAFADLLHAHFYESCPYLKFAHFTANQAILEAFAGCRRVHVVDFGIKQGMQWPALLQALALRPGGPPSFRLTGVGPPQPDETDALQQVGWKLAQFAHTIRVDFQYRGLVAATLADLEPFMLQPEGEADANEEPEVIAVNSVFELHRLLAQPGALEKVLGTVHAVRPRIVTVVEQEANHNS

SEQ ID NO: 3448 - protein, 253 aa, Brassica napus
  misc_feature (155)..(155): Xaa can be any naturally occurring amino acid
  misc_feature (192)..(193): Xaa can be any naturally occurring amino acid
  misc_feature (197)..(197): Xaa can be any naturally occurring amino acid
METLNPLSHVPISDHRFVGQDMMSLQSPSSIWTKEENKMFERALAIYPEDSPDRWFKIASMIPGKTVFDVMKQYSKLEEDVFDIEEGRVPIPGYPSPLGLAQDTYRKRPNGARGSDHDRKKGVPWTEEEHRRFLLGLLKYGKGDWRNISRNFVVXKTPTQVASHAQKYYQRQLSGAKDKRRPSIHDITTGNXXNANXNRSFSDHRDILPDLVFIEKDNAEGLMCMSPNLFSPSSAPFDDAFNFAGVNAFSAGA

SEQ ID NO: 3449 - protein, 241 aa, Arabidopsis thaliana
MCALVPPLYPNFGWPCGDHSFYETDDVSNTFLDFPLPDLTVTHENVSSENNRTLLDNPVVMKKLNHNASERERRKKINTMFSSLRSCLPPTNQTKLSVSATVSQALKYIPELQEQVKKLMKKKEELSFQISGQRDLVYTDQNSKSEEGVTSYASTVSSTRLSETEVMVQISSLQTEKCSFGNVLSGVEEDGLVLVGASSSRSHGERLFYSMHLQIKNGQVNSEELGDRLLYLYEKCGHSFT

SEQ ID NO: 3450 - protein, 368 aa, Zea mays
  misc_feature (236)..(236): Xaa can be any naturally occurring amino acid
MTAQNPPTGQDTQSRATPPTIGDQQPAAGASCLKTPSRSRTEDWQAQPKPPLLVLGFIASNPDHIMGQPVTRRRERDAEAELDLPPGFRFHPTDDELVEHYLCRKAAGQRLPVPIIAEVDLYRFDPWDLPERALFGAREWYFFTPRDRKYPNGSRPNRAAGDGYWKATGADKPVAPRAAAADARTLGIKKALVFYAGKAPRGVKTDWIMHEYRLADAGRRAKKGSLRLDDWVLCRXLYNKKNEWEKMRLGKGAAAGAVKEEEAMDMSTSHSQITHSWGETRTPESEIVDNDLPFPDPAMMVPKKERVDDGGSARTSDLFVDLSYDDIQGMYSGLDMLPPAGEDLYSSLFASPRVRGNQPTGPAGLGPF

SEQ ID NO: 3451 - protein, 309 aa, Glycine max
YFFIMMAVARKEMDRIKGPWSPEEDEALQKLVERHGPRNWSLISRSIPGRSGKSCRLRWCNQLSPQVEHRAFTPEEDETIIRAHARFGNKWATIARLLSGRTDNAIKNHWNSTLKRKCASFMTADEAAGGGFSPRPLKRSFSAGTAVPPPGSPSGSDVSESSAAPGVVSVSVSVSPSQVFRPVPVRPVVETASSQDDADAEDAGPTTSLSLSLPGVESSEISNRTSTVPVMPVNTVAVAAPVPLPAPEVGLGALNLNAEFMAVMHEMIRKEVRSYMEQQNGMMCFQGMEMMEGFRNVSVKRIGISRVDS

SEQ ID NO: 3452 - protein, 582 aa, Zea mays
MDTLFRSVSLQASEQQQQQQSASYNSRSTTSSGSRSSSHQTDASYNYYYHSNSGVGGVGQYYYGQQHPHQHQHQQYYLEPYQQEECGNAHRLYMDEDFSSSSSSRQHFHSHGAAVQPATSSAVTATAPTPPLSTSSTAAGAAHALFEAADLSFPPDLNLDFSSPASSSGGCVASSAAVGGGGGGRWASQLLLECARAVAARDSQRVQQLMWMLNELASPYGDVEQKLASYFLQGLFARLTASGPQTLRTLAAASDRNTSFDSTRRTALRFQELSPWSSFGHVAANGAILESFLDAAAAAARLLWPTLLEALATRSTDDTPHLSITTVVSSAPSAPTAAVQRRQRVMREIGQRMEKFARLMGVPFSFRAVHHAGDLAGLDLDALDLRDGGATTALAINCVRSLRGVVPGGARRRDAFAASLRRLDPRVVTVVEEEADLVAFDPGAPDESGDTEAAFLKVFGEGLRFFSAYMDSLEESFPKTSNERLALERGAGRAIVDLVSCPASESMERRETAASWARRMRSSGFSPVAFSEDVADDVRSLLRRYREGWSMRDAGLDDSEAGAGVFLAWKEQPLVWASAWRP

SEQ ID NO: 3453 - protein, 224 aa, Aristida purpurea var. longiseta
IENKISRQVTFAKRRNGLLKKAYELSLLCDAEVALIIFSGRGRLFEFSSSSCMYKTLERYRSCNYNPQEAKAPQESEINYQEYLKLKTRVEFLQTTQRNILGEDLGPLSMKELVQLENQIEISLKQIRSRKNQMLLDQHYDLKNKEQKLQDLNKDLRKKLQETSGENALHISWEEGGHSGASGNAIEPNQGFLQHPENDSSLQIGYHQQAYMDQLSNEDMGAHH

SEQ ID NO: 3454 - protein, 157 aa, Brassica napus
MKRGHGETWDPAPQSQQPSGSCEGSSSVVDNIKGKMADDSNMDELLEVLGYKVRSSEMAEVAQKLEQLEMVLSNDDVGSTVLNDTVHYNPSDLSNWVETMLSELNNPEPSDLDPTRICEDRSEYGLSAIPGLSAFPKAEEGAEEEASSKRIRLESVG

SEQ ID NO: 3455 - protein, 789 aa, Oryza sativa (japonica cultivar-group)
MPDLPCDGDGVCMVCRVASPPEVDLLRCSTCATPWHSPCLSKPPALADAAQWSCPDCSGDSTDAPPPAPAPLAPGSAGQLVAAIRAIECDATLSDQEKARRRQELLGGAAPAGADADDDEGDDVLEVIGKNFSCAFCMKLPERPVTTPCGHNFCLKCFQKWIHSGKRTCGKCRAQIPAKMAEQPRINSALVSVIRMAKVSKNANSAVSAAAYHYIRNDDRPDKAFTTERAKRAGKANASSGQIFVTIPPDHFGPILAENDPKRSIGVLVGDTWEDRLECRQWGAHFPHVAGIAGQSTHGAQSVALSGGYVDDEDHGEWFLYTGSGGRDLSGNKRTNKEQSSDQKFEKLNAALRISCLKGYPVRVVRSHKEKRSSYAPEAGVRYDGVYRIEKCWRKISVQGKFKVCRYLFVRCDNEPAPWTSDIYGDRPRPLPKVDELKGATDISERKGTPSWDFDEKEGWKWVKPPPISRKPNLSGDPATDKEIRRVARRAQMSVTERLLKEFGCSICKQVMKEPLTTPCAHNFCKLCLVGTYGSQSSMRERSRGGRTLRAQKIVKKCPSCPTDICDFLENPQINREMMDLIESLQRKAVEEGDTKTSSDVSNGAESSGDDGNNEALEKGEDDSSLKDDGSLKDDGKVVKAVVVIKEEDLQPKKSKGEDEKEQGDKKMDSADVVDIAVEKKQATKRASEKAEKKQARKRKGDAVATNDGKRMKTGGDAMETAAEEDAPLSGGTPVKRNSRKSSEVDAKGGGGSPVVSSPRRVTRSNAKASGEADGSPATRTRRATRAEA

SEQ ID NO: 3456 - protein, 322 aa, Oryza glumipatula
VVATADPSAADSARDTKRMRTGGGSMSSSSSSSSSLGGGASRGSVVEAAPPATQGTAAANAPAVPVVVVDTQEAGIRLVHALLACAEAVQQENFAAAEALVKQIPTLAASQGGAMRKVAAYFGEALARRVYRFRPADSTLLDAAFADLLHAHFYESCPYLKFAHFTANQAILEAFAGCRRVHVVDFGIKQGMQWPALLQALALRPGGPPSFRLTGVGPPQPDETDALQQVGWKLAQFAHTIRVDFQYRGLVAATLADLEPFMLQPEGEADANEEPEVIAVNSVFELHRLLAQPGALEKVLGTVHAVRPRIVTVVEQEANHNS

SEQ ID NO: 3457 - protein, 185 aa, Spartium junceum
SGPYPYFPSSSSSYHPFPFINPENASENNNTFPHDPLSVSYNIPTTHHHAPNPETLANFADCAAAMLKNDVNGSYFGFSNLLTKKPAPKKDRHSKIHTSQGLRDRRVRLSIEIARKFFDLQDMLGFDKASNTLEWLFNKSKKAMKELAQSKNSSSSVANSFSSSDSECEMVSIINQDSIDATPEG

SEQ ID NO: 3458 - protein, 253 aa, Zea mays
  misc_feature (32)..(32): Xaa can be any naturally occurring amino acid
  misc_feature (45)..(45): Xaa can be any naturally occurring amino acid
  misc_feature (63)..(63): Xaa can be any naturally occurring amino acid
  misc_feature (85)..(85): Xaa can be any naturally occurring amino acid
  misc_feature (104)..(104): Xaa can be any naturally occurring amino acid
  misc_feature (153)..(153): Xaa can be any naturally occurring amino acid
  misc_feature (175)..(175): Xaa can be any naturally occurring amino acid
  misc_feature (230)..(230): Xaa can be any naturally occurring amino acid
  misc_feature (238)..(238): Xaa can be any naturally occurring amino acid
GNKNHYGHGVCGGYPAVAKMLNLSSPVVYVPXITHVDHASLTGAXHLASTIKTRMCTKYNTTXGSKFGDKCHFAYSKRELGKRAXIPQEGPPMGGQYGRVEPMXLGAMGLLAGNFGASMTANISVDASLTGGIIGKGGVNTKQISRVTGIKLXSIHDHESNPNLHNIKLEGNFYXIKQANNLVCDLIATISASMLAKNPSAIVVPARGRGDGLGGRSNNNKMKLCENFMXGACTFGHXCHFAHGEIEQRRGAA

SEQ ID NO: 3459 - protein, 257 aa, Arabidopsis thaliana
MDHLLQHQDVFGNYNKAREAMGLSYSSNPTPLDNDQKKPSPATAVTRPQPPELALRCPRCDSTNTKFCYYNNYSLTQPRYFCKSCRRYWTKGGTLRNIPVGGGCRKNKRSTSSAARSLRTTPEPASHDGKVFSAAGFNGYSNNEHIDLSLAFALLNKQHPGSSSQLGFHSELGSSHQSDMEGMFGTSQQKENATYAFGNGSSGLGDPSRVLWGFPWQMNGESFGMMNIGGGGGHVDQIDSGREMWTNMNYINSGALM

SEQ ID NO: 3460 - protein, 245 aa, Pinus radiata
MGRGKVELKRIENKINRQVTFAKRRNGLLKKAYELSVLCDAEVALIIFSNRGKLYEFCSSSSMMKTIEKYQKCSYGSLETNCSINEMQNSYQDYLELKARVEVLQRSQRNLLGEELGPLNSKELEQLEHQLENSLKQIRSAKTQFMFDQLAHLQHKEQMLVEANRELRKKLEESNTRIPLRLGWEAEDHNNISYRRLPTQSQGLIFQPLGGYPNMQIGYNPAGSNELNVSPADQHPNGFIPGWML

SEQ ID NO: 3461 - protein, 116 aa, Brassica rapa
WRKYGQKVTRDNPSPRAYFRCSFAPSCPVKKKVQRSAEDPSILVATYEGTHNHLGPNGSEGDVTSQVGSSTVTLDLVHSGQGTMQEVLVRQMASSLTKDSKFTAALAAAISGRLME

SEQ ID NO: 3462 - protein, 424 aa, Triticum aestivum
MDMNESSEKGMEGNGSSGPGGGIPVEWQSQFSGGGFSAHQHQQHPHMMDSFGSGMWSAASQHGAGFLAPVPGFLPPPGLGGHFPVDSGFIERAARSSCFVGPGAGGGMMGAGAFGGAGDQQMGSAFGEGYLDHRRKEGGDKAEPELAGSGGVPSSEAAGGDCSSKGSDSKKRRRPSEVMGGDQVQSSNVAADSANESAQSKDKGEESSPATGTTTGGKSKGKGAKESSEKEDYIHVRARRGQATNSHSLAERLRREKISERMKLLQDLVPGCSKVTGKAVMLDEIINYVQSLQRQVEFLSMKLATVNPRLDLNIEGLLSKDLLRFPGVSSSSMGFSPEMMHPQLQLSQPGLMQGGAAAMANSDVFRRIMQAQLGAKDGSHSQMAHALNGPFSDHVAQMAYPSMGSSHSHSQDLSIRPSQDAYQM

SEQ ID NO: 3463 - protein, 216 aa, Dendrobium thyrsiflorum
KAHEISVLCDAEVAVIVFSNKGKLYEYSTDSSMEKILERYERYSYAERALFSNEANPQADWRLEYNKLKARVESLQKSQRHLMGEQLDSLSIKELQHVEQQLESSLKHIRSRKAQLILDSISELQKKEKILLEQNKTLEKEIIAKEKAKALMQNAPWEKQNLSRYSSAPLHVISDSVPTPTSRTFQAIANEEESPQAQLRVSNTLLPPWMLGHMNG

SEQ ID NO: 3464 - protein, 590 aa, Zea mays
  misc_feature (528)..(528): Xaa can be any naturally occurring amino acid
MESEDDMHDANDSAEDDFYSGGEAGLAASDDGDADYDFADHDSDDSAELISHRQQQNYSILSEVDIQRRQEDDINRVSTVLSISKPEACVLLRNYNWSVSKVHDKWFADEERVRKVVGLPEKHNEVPNDREVTCGICFESCPRGSMSAAACGHPFCSTCWRGYISTAISDGPGCLMLRCPDPSCAAAVGQDMINSLAADDDKEKYGRYLRRSYIEDNRKTKWCPAPGCEYAVEFVMGSGSYDVNCNCSYGFCWNCTEEAHRPVDCATVSKWILKNSAESENMNWILANSKPCPKCKRPIEKNQGCMHITCTPPCKFEFCWLCLGPWSEHGERTGGFYACNRYESARQEGAYDESERRREMAKNSLERYTHYYERWAANQSSRQKALGDLQSLQNDKLERLSDIQSQPESQLKFIVEAWLQIVECRRVLKWTYAYGFYLPEHEHAKRQFFEYLQGEAESGLERLHQCAEKELQIYLDAESPSKDFNDFRTKLAGLTSVTRNYFENLVRALETGLNDVGPSTSHGTCSKXSATSKSLGGKSKSGKNRASSSSSKSGGSTRGVDDSNIWTCDQCTYANPKSARACQACDRQHR

SEQ ID NO: 3465 - protein, 248 aa, Populus trichocarpa
MGRGRVQLKRIENKINRQVTFSKRRTGLLKKANEISVLCDAEVALIVFSHKGKLFEYSTDDSMEKILERYERYSYAERQLVATDLDSQGNWTLEYNRLKAKVELLQRNHRNYLGEDLDSMSLKELQNLEQQIDTALKHIRARKNHLMSQSISELQRKEKAIQVQNNMLVKQIKEKEKNDKALAQPAFWDLQDHGPNASSFLLSQPAGLPLPCLNIGGSHQEEAPEARRNELGHTLEPIYSFHLGGYGA

SEQ ID NO: 3466 - protein, 986 aa, Arabidopsis thaliana
MEEKRRDSAGTLAFAGSSGDSPASEPMPAPRRRGGGLKRKANALGGSNFFSSAPSKRMLTREKAMLASFSPVHNGPLTRARQAPSIMPSAADGVKSEVLNVAVGADGEKPKEEEERNKAIREWEALEAKIEADFEAIRSRDSNVHVVPNHCGWFSWEKIHPLEERSLPSFFNGKLEGRTSEVYREIRNWIMGKFHSNPNIQIELKDLTELEVGDSEAKQEVMEFLDYWGLINFHPFPPTDTGSTASDHDDLGDKESLLNSLYRFQVDEACPPLVHKPRFTAQATPSGLFPDPMAADELLKQEGPAVEYHCNSCSADCSRKRYHCPKQADFDLCTECFNSGKFSSDMSSSDFILMEPAEAPGVGSGKWTDQETLLLLEALEIFKENWNEIAEHVATKTKAQCMLHFLQMPIEDAFLDQIDYKDPISKDTTDLAVSKDDNSVLKDAPEEAENKKRVDEDETMKEVPEPEDGNEEKVSQESSKPGDASEETNEMEAEQKTPKLETAIEERCKDEADENIALKALTEAFEDVGHSSTPEASFSFADLGNPVMGLAAFLVRLAGSDVATASARASIKSLHSNSGMLLATRHCYILEDPPDNKKDPTKSKSCSADAEGNDDNSHKDDQPEEKSKKAEEVSLNSDDREMPDTDTGKETQDSVSEEKQPGSRTENSTTKLDAVQEKRSSKPVTTDNSEKPVDIICPSQDKCSGKELQEPLKDGNKLSSENKDASQSTVSQSAADASQPEASRDVEMKDTLQSEKDPEDVVKTVGEKVQLAKEEGANDVLSTPDKSVSQQPIGSASAPENGTAGGNPNIEGKKEKDICEGTKDKYNIEKLKRAAISAISAAAVKAKNLAKQEEDQIRQLSGSLIEKQQLHKLEAKLSIFNEAESLTMRVREQLERSRQRLYHERAQIIAARLGVPPSMSSKASLPTNRIAANFANVAQRPPMGMAFPRPPMPRPPGFPVPGSFVAATTMTGSSDPSPGSDNVSSV

SEQ ID NO: 3467 - protein, 238 aa, Avena sativa
IENKISRQVTFAKRRNGLLKKAYELSLLCDAEDALIIFSGRGRLFEFSSSSCMYKTLERYRTCNYNSQEAAPLVENEINYREYLKLKTRVEFLQSSQRNILGEDLGPLSMKELDQIESQIDVSLKHIRSRKNQVLLDQLFDLKSKEQELQDQNKDLRKKLQEMSCGENAVHMSWQDGGGQSSSSGQAVDPYPGPLQHPEHDSSMQIGYHQTYMEQLBNEDHTASHHPNAQPGSSAGWI

SEQ ID NO: 3468 - protein, 543 aa, Ashbya gossypii ATCC 10895
MLESDLDDDTYELSYEYDDIDEFSLASDDGQGGITSGTSTTLVNDGGYEPRRLSPGACVISCNDVWPSMGMKHQASTYNATATLEYTSLTTSDISQMMIERVSHLAPILGIAETDIILLLQDYKWNEAQFIEAYMEDPAKVFESAGLRSPFEEEKDSRAYLHTQADFTCQICYTYYEVSETFSLPCCHEYCIGCYRRYVTDKLNHGCVVQCMGCDIAMTNEDIGMIVGKKASELLLLSSIKIFIQKHKHRYKWCPFSDCDYVIHVTDPHWLVELESSNSSPYVTCKNGHSFCFNCVTDMHAPCDCVLASSWLEKSQQESKALNWILQHTKECPKCETSIIRDGGCNHMKCGTCHHEFCWICEADWRLHTKDYFECNASLREMKLDKFGNGDEKLLLQQYGQYCKHFNMHEESARLDVALGKKVKTKLRTLQDKLGVSSVEAQFIFGAIEKLRDGRTALKWSFAMAYFANRSHNLYTIFRQTQVELSRAVEDLSELLQLEDPKLIMKRKQLFYNKADYVQNRKNALFRCGEELLAKNICKDSSA

SEQ ID NO: 3469 - protein, 292 aa, Brassica napus
VILSDKQLSPRPTATGFLYPGGAGDYSQMFDGLEEDGSLEDIGVGHASSTAAAEKKRRLSVVQVKALEKNFEIDNKLEPERKVKLAQELGLQPRQVAIWFQNRRARWKTKQLERDYGVLKSNFDSLKRSRDSLQRDNDSLLAEIKELRAKLDVEGTGGNNGNAVTEETGVVKPVETVAFQTVIANNEVLELSQCPPLPREAPASELAYEMFSIFPRAESFREDPADSSDSSAVLNEEYSPTAVAATAVEMSTMGCFGQFVKMEEHEDLFSGEEACKLFADNEQWFCSGQWSS

SEQ ID NO: 3470 - protein, 168 aa, Triticum aestivum
  misc_feature (110)..(110): Xaa can be any naturally occurring amino acid
MRNGSTVCDAAAAVGLGVAPRYRGVRKRPWGRFAAEIRDPAKRARVWLGTYDSAEAAARAYDVAARTLRGPLATTNFPQDLVSFPALPALPRPSRPASPGPACSASSTVXSYSGPRAANAPPAVPRAPAPAAPPGEAPGRRPPDARATGPSSGLRRGRTPGDEAPLGP

SEQ ID NO: 3471 - protein, 222 aa, Chasmanthium latifolium
IENKISRQVTFAKRRNGLLKKAYELSLLCDAEVALIIFSGRGRLFEFSSSSCMYKTLERYRSSNYNSQEVKAPLDSEINYQEYLKLRTRVEFLQTTQRNILGEDLGPLSMKELEQLENQIEISLKHIRTRKSQVLLDQLFDLKTKEQELEDISKGLRKKLHETSGENALHISWEEGGHSGASGNAVEPYQGFQQHRENESSLQIGYRQQAYMEQLNNEDMED

SEQ ID NO: 3472 - protein, 225 aa, Danthonia spicata
IENKISRQVTFAKRRNGLLKKAYELSLLCDAEVALIIFSGRGRLFEFSSSSCMYKTLERYRTCNFNSQEAKAPLDSEINYQEYLKLKTRVEFLQTTQRNILGEDLGPLSSKELEQLENQIEISLKHIRTRKNQALLDQLFDLKSKEQELQDLNKDLRKKLQETSGENAVHISWEEGGHSGASGNAMEPSQGFLQHPENDSDLHMGYHQQAYMDHLNNEDMAAPHH

SEQ ID NO: 3473 - protein, 225 aa, Ehrharta erecta
IENKISRQVTFAKRRNGLLKKAYELSLLCDAEVALIIFSGRGRLFEFSSSSCMYKTLERYRSCNYNSQEAAPENEINYQEYLKLKTRVEFLRTTQRNILGEDLGPLSMKELEQLENQIVVSLKQIRDKKNQALLDQLFELKSKEQELRDLNKDLRKKLQETTGDNVLHMSWQDGGGQHSGSSGLTAEHHQGLLHHQDQGNHSLQIGYHQAYMDHLNNEAEMAGHN

SEQ ID NO: 3474 - protein, 229 aa, Eleusine coracana
LENKISRQVTFAKRRNGLLKKAYELSLLCDAEVALIIFSAGRGRLFEFSSSSCMYKTLERYRTCNFNSHEVKAPLDSKINYQDYLKLKTRVEFLQTTQRNILGEDLGPLSNKELEQLEKQIEISLTQIRSRKNQMLLVQLLDLKSKEQELQDLNKDLRKKCQLKKTCGENATHISWEEGGHSGTSRNANEPNQGFLQHAENNYSSLQIGYYQQAYMDQLNNQDIGAAHN

SEQ ID NO: 3475 - protein, 245 aa, Arabidopsis thaliana
MALETLNSPTTTTTARPLLRYREEMEPENLEQWAKRKRTKRQRFDHGHQNQETNKNLPSEEEYLALCLLMLARGSAVQSPPLPPLPSRASPSDHRDYKCTVCGKSFSSYQALGGHKTSHRKPTNTSITSGNQELSNNSHSNSGSVVINVTVNTGNGVSQSGKIHTCSICFKSFASGQALGGHKRCHYDGGNNGNGNGSSSNSVELVAGSDVSDVDNERWSEESAIGGHRGFDLNLPADQVSVTTS

SEQ ID NO: 3476 - protein, 145 aa, Zea mays
MNTVSGTKRAPRRQSQDGSGDKLVVIVEPITVVDLEVEASREGSKRQRVEPVGRHLYPDWGARSSLQSNAVQTSKEPAKEVPEEPSFTCPICWNKMEEPSTTTCGHVFCDTCIKQAIKVQKKCPTCRKGLKMNSVHRIYLPNGSS

SEQ ID NO: 3477 - protein, 322 aa, Oryza sativa (japonica cultivar-group)
VVATADPSAADSARDTKRMRTGGGSTSSSSSSSSSLGGGASRGSVVEAAPPAMQGAAAANAPAVPVVVVDTQEAGIRLVHALLACAEAVQQENFAAAEALVKQIPTLAASQGGAMRKVAAYFGEALARRVYRFRPADSTLLDAAFADLLHAHFYESCPYLKFAHFTANQAILEAFAGCRRVHVVDFGIKQGMQWPALLQALALRPGGPPSFRLTGVGPPQPDETDALQQVGWKLAQFAHTIRVDFQYRGLVAATLADLEPFMLQPEGEADANEEPEVIAVNSVFELHRLLAQPGALEKVLGTVHAVRPRIVTVVEQEANHNS

SEQ ID NO: 3478 - protein, 83 aa, Dubautia menziesii
KRRNGIFKKAHELTVLCDAKVSLIMFSNTGKFHEYISPSTTTKKIYDMYQTTLGFDLWTSHYERMTETMKKLKESNNKLRREI

SEQ ID NO: 3479 - protein, 214 aa, Dendrobium thyrsiflorum
KAHEISILCDTEVALIIFSTKGKLYEYSTDSCMDRILERYERYCYAEKALQNTEPESQGDMSQEYGKLKNKIEALQKSRSHLMGENLDTLSLKELQHLEQQLETALKHIRSQRTQLLLNSIAELQRKEKSLLEHNSLLEKKITENESTTAMTQDLNPKQQRQAQESSSPPPFINDIPTLNLGTYPVSHGEEVAEPPLTGMNSNSLPPWMLRSLT

SEQ ID NO: 3480 - protein, 179 aa, Triticum aestivum
  misc_feature (84)..(84): Xaa can be any naturally occurring amino acid
  misc_feature (112)..(112): Xaa can be any naturally occurring amino acid
MRNGSTVCDAAAAVGLGVAPRYRGVRKRPWGRFAAEIRDPAKRARVWLGTYDSAEAAARAYDVAARTLRGPLATTNFPQDPVSXPHAPHAPNPSRPVSPGPACSASSTVESXSGPEPRTRPRPVPRVSAPGPLAGGPLRRRTKMPEGTAPRRPPSGEQRRPTKPPSAAFRPSAPFCCQT

SEQ ID NO: 3481 - protein, 322 aa, Oryza sativa (japonica cultivar-group)
VVATADPSAADSARDTKRMRTGGGSTSSSSSSSSSLGGGASRGSVVEAAPPATQGAAAANAPAVPVVVVDTQEAGIRLVHALLACAEAVQQENFAAAEALVKQIPTLAASQGGAMRKVAAYFGEALARRVYRFRPADSTLLDAAFADLLHAHFYESCPYLKFAHFTANQAILEAFAGCHRVHVVDFGIKQGMQWPALLQALALRPGGPPSFRLTGVGPPQPDETDALQQVGWKLAQFAHTIRVDFQYRGLVAATLADLEPFMLQPEGEADANEEPEVIAVNSVFELHRLLAQPGALEKVLGTVHAVRPRIVTVVEQEANHNS

SEQ ID NO: 3482 - protein, 394 aa, Glycine max
MGWGHLGRHGSDSVDGAVAGPSTSATEPRRFPLAAQPEMMRAAEKDDQYASFVYEACRDAFRHLFGTRVAVAYQNETKLLGQMLYYVLTTGSGQQTLGEEYCDITQVAGPYGLPPTPARRALFVVYQTAIPYIAERISSRIASRGIVLADYESAEGFGENAHRSHSAQISGTSPSSSSGQSVTTLSRLKGKMSAFWLHLVQRWPTMLPFVRELLQLVLRANLMLFYFEGLYYHISKRAAGIRYVFIGKASNQRPRYQILGVFLLIQLCIIAAEGLRRRNLTSITGSVHQASFATHDRSAGHGLPVLNEEGNLATPDIDKRSWVSESSSSEYHATSGVSKCTLCLSNRQHPTATSCGHVFCWNCITEWCNEKPECPLCRTPITHSSLVCVYHSDF

SEQ ID NO: 3483 - protein, 332 aa, Pennisetum glaucum
MQSLTDGVVVTSIRKKRPRRSRDGPTSVAAVIQRWAEHNKQLEHDSDGAKRPRKAPAKGSKKGCMKGKGGPENTHCGYRGVRQRTWGKWVAEIREPNRVNRLWLGTFPTAEDAARAYDEAARAMYGELARTNFPSQKAVASSQAARVPTPAQVAPAAVEGVVPSTSCESTTTSNHSDVASSSNKTEASDMSSSVKVECPEAVGAGSHRSEMVSGISHQHEDSHPSIQASTPNISDKEVFEPLEPIENLPEGDFDGFDIDEMLRMMEADPQNEGGAGAGAGAGGGMEQTFFFDGLDPNLLESMLQSEPEPYSLSEEQDMFLAGFESPGFFEGL

SEQ ID NO: 3484 - protein, 322 aa, Oryza sativa (japonica cultivar-group)
VVATADPSAADSARDTKRMRTGGGSTSSSSSSSSSLGGGASRGSVVEAAPPATQGAAAANAPAVPVVVVDTQEAGIRLVHALLACAEAVQQENFAAAEALVKQIPTLAASQGGAMRKVAAYFGEALARRVYRFRPADSTLLDAAFADLLHAHFYESCPYLKFAHFTANQAILEAFAGCRRVHVVDFGIKQGMQWPALLQALALRPGGPPSFRLTGVGPPQPDETDALQQVGWKLAQFAHTIRVDFQYRGLVAATLADLEPFMLQPEGEADANEEPEVIAVNSVFELHRLLAQPGALEKVLGTVHAVRPRIVTVVEQEANHNS

SEQ ID NO: 3485 - protein, 322 aa, Oryza sativa (indica cultivar-group)
VVATADPSAADSAKDTKRMRTGGGSTSSSSSSSSSLGGGASRGSVVEAAPPAMQGAAAANAPAVPVVVVDTQEAGIRLVHALLACAEAVQQENFAAAEALVKQIPTLAASQGGAMRKVAAYFGEALARRVYRFRPADSTLLDAAFADLLHAHFYESCPYLKFAHFTANQAILEAFAGCRRVHVVDFGIKQGMQWPALLQALALRPGGPPSFRLTGVGPPQPDETDALQQVGWKLAQFAHTIRVDFQYRGLVAATLADLEPFMLQPEGEADANEEPEVIAVNSVFELHRLLAQPGALEKVLGTVHAVRPRIVTVVEQEANHNS

SEQ ID NO: 3486 - protein, 97 aa, Arabidopsis thaliana
MASSSMSSQSSGSWTAKQNKAFEQALATYDQDTPNRWQNVAKVVGGKTTEEVKRHYELLVQDINSIENGHVPFPNYRTSGGCTNGRLSQEEKRYVLS

SEQ ID NO: 3487 - protein, 407 aa, Oryza sativa (indica cultivar-group)
MASHAGGSGGGGGGSGRDAGSAQRGSMQGLARQGSLYGLTLNEVQSQLGEPLLSMNLDELLKSVFPDGVDLDGGGGGIAGQSQPALGLQRQGSITMPPELSKKTVDEVWKGIQDVPKRGAEEGGRRRRERQPTLGEMTLEDFLVKAGVVTDPNDLPGNMDVVGGAAAAAAGTSDLNAGAQWLQQYHQQALEPQHPSIGAPYMATHLAPQPLAVATGAVLDPIYSDGQITSPMLGALSDPQTPGRKRGATGEIADKLVERRQKRMIKNRESAARSRARKQAYTNELENKVLRLEEENERLKKQKPTFILSSKVSRKQVTKAMRSATICVLCICILMILQCFASISAVDLGDAAASASGGEGLIRPRKLLQNAPAARSPPSRSAAAVEVEVNASLGKQKPSSKSNPRQN

SEQ ID NO: 3488 - protein, 322 aa, Malus x domestica
MGIPTMGSQGGADGNCKQSQFQPLARQNSIYSLTLDEVQNQLGDLGKPLSSMNLDELLKNVWSAEANQIMGIDIEGNTLVNQAQLQRQASLSLTSALSKKTVDEVWKDIQQSKDEEEKKSQERQRTLGEMTLEDFLVKAGVVAEAEASSDKKYADPLVGVDANVAAQLPQGQWMQYPQPQYQHPQQSMMGVYMPSQPLQPPMHVGAGAMMEVPYPDNQVAVPSPLMGTLSDTQTPGRKRGNPEDIVEKTVERRQKRMIKNRESAARSRARKQAYTNELENKVSRLEEENERLRKQKEQEKVLPSAPPPEPKYQLRRTTSAPF

SEQ ID NO: 3489 - protein, 374 aa, Arabidopsis thaliana
MGRHSCCYKQKLRKGLWSPEEDEKLLTHITNHGHGCWSSVPKLAGLQRCGKSCRLEQIWYRRLRWINYLRPDLKRGAFSPEEENLIVELHAVLGNRWSQIASRLPGRTDNEIKNLWNSSIKKKLKQRGIDPNTHKPISEVESFSDKDKPTTSNNKRSGNDHKSPSSSSATNQDFFLERPSDLSDYFGFQKLNFNSNLGLSVTTDSSLCSMIPPQFSPGNMVGSVLQTPVCVKPSISLPPDNNSSSPISGGDHVKLAAPNWEFQTNNNNTSNFFDNGGFSWSIPNSSTSSSQVKPNHNFEEIKWSEYLNTPFFIGSTVQSQTSQPIYIKSETDYLANVSNMTDPWSQNENLGTTETSDVFSKDLQRMAVSFGQSL

SEQ ID NO: 3490 - protein, 235 aa, Leersia virginica
LENKISRQVTFAKRRNGLLKKAYELSLLCDAEVALIIFSGRSRLFEFSSSSCMYKTLERYRSCNYNSQDAAAPENEINYQEYLKLKTRVEFLQTTQRNILGEDLGPLSMKELEQLENQIEVSLKQIRTRKSQALLDQLFDLKSKEQQLQDLNKDLRKKLQETSAENVLYMSWQDGGGHSGSATVLAADQPHHHQGLLHPHPEGDHSLQIGYHHTHHHHQAYMDHLNNEADMVAHH

SEQ ID NO: 3491 - protein, 225 aa, Lithachne humilis
IENKISRQVTFAKRRNGLLKKAYELSLLCDAEVALVIFSGRGRLFEFSSSSCVHKTLERYRSCNYNTQEANAPVENEINYHEYLKLKTRVDFLQTNQRNILGEDLGPLSMKELEQLDNQIETSLKQIRSRKNQVLLDQLFDLKSKEQELQDINKDLRKKLQETNGDQKVVHINSWQDGGQGSSSGHAIEPYQGLIQHPENDPSMQIAYHQVYMDQLNHEDMAAQH

SEQ ID NO: 3492 - protein, 222 aa, Panicum miliaceum
IENKISRQGTFAKRRNGLLKKAYELSLLCDAEVALIIFSGRGRLFEFSSSSCMYKTLERYRSSNYSSQEVKTPLDGEINYQDYLKLKTRVEFLQTTQRNILGEDLGPLSMKELEQLENQVEISLKHIRTRKNQMLLDHLFDLKSKEQELQDLNKDLRKKLQETNAENVLHVSWEEGGHSGASGNAIEPYQGFLQHPENDPSLQIGYHQQAYMDQLNNEDMAD

SEQ ID NO: 3493 - protein, 367 aa, Zea mays
MVDRLSSLVMSSSSFPSIQQPPPAGAIGGTSPYSASTSFLPSFTIIAALLAFVFLASVSIHLLLRFLSDRSSSSSTPTSRPPPPQTHRDAAGSRAADASVARPAAAAAPADARGKEEAAPGDAEKQRLIDSLPLFTMASALPSSSPDCAVCLSPFAPDAELRLLPACRHAFHAACVDAWLRTAPSCPLCRSAVALPPHPSQAQQPPTPRARGQSGPSFLVEMGTVSTRGGGQRNSRTYSLGSFDYQIDEEVEAVAFPVARITASTVKEDKPPSVEEGPPLSLSPPPPRETVGTSRGWLREYVDRLASSAYTFSERWSSRWSQGLQSQQRQEEPWLWDAEAAAMLAAPGSGDEEETAFMVMYRWIAGV

SEQ ID NO: 3494 - protein, 587 aa, Brassica oleracea
MEMESCKLFIGGISWETTEDRLREYFQSFGEVLEAVIMKDRATGRARGFGFLVFSDPIVAERVVFLRHVIDGKLVEAKKAVPRDDHVVLNKSYNTSLQGSPGPANSKKIFVGGLASSVTEAEFKKYFAQFGVITDVVVMYDHRTQRPRGFGFISFESEDAVDKVLQRTFHELNGKMVEVKLAVPKEMALNPIRNQMNVNSFGSSRISALLMNEYTQGFSPSPISGYGVKPEVRYSPGLGNRGGGFSPFGHGYGIELNFEPDQSQNFGSGSSAGFGRPLSPGYAPSLGRYGSQIESGGAGNGPVLNAATKNHLWGNGGGLGYMSNSPISRSSFNGMSSLGSIGDNSRRNSYRSEGGGGLGLEAMRGGHVGGYSSGSSSLETDSLYSDSAWLSLPAKAEERMGAFDFMSRGPAGYINRQPNGEVAAASPLSSASSECNSNSCRWKPYSNSTDFQANASVLLILIFSSLICALSLCAAIRCFLRPTTPETDDNDHKSDLEADSSFTIPTPTLVYSSDLELAGAEAECAICLSEFEQGESIQVLEKCHHGFHVKCIHKWLSSRSSCPTCRTSIFLQSTLDSTPSTEAPSTN

SEQ ID NO: 3495 - protein, 239 aa, Arabidopsis thaliana
MADNDGAVSNGIIVEQTSNKGPLNAVKKPPSKDRHSKVDGRGRRIRMPIICAARVFQLTRELGHKSDGQTIEWLLRQAEPSIIAATGTGTTPASFSTASLSTSSPFTLGKRVVRAEEGESGGGGGGGLTVGHTMGTSLMGGGGSGGFWAVPARPDFGQVWSFATGAPPEMVFAQQQQPATLFVRHQQQQQASAAAAAAMGEASAARVGNYLPGHHLNLLASLSGGANGSGRREDDHEPR

SEQ ID NO: 3496 - protein, 222 aa, Pennisetum glaucum
IENKISRQVTFAKRRNGLLKKAYELSLLCDAEVALIIFSGRGRLFEFSSSSCMYKTLERYRSSNYGSQEVKTPSDGEINYQDYLELKTRVEFLQTTQRNILGEDLGPLSMKELEQVENQIEISLKHIKDKKNQMLLNQLFDLKSKEQELQDLNKDLRKKLQETNAESVLHLSWEEGGHSGTGGNAIEPYQGFLQHPENDPSLQIGYHQQAYIDQLNNEDMAD

SEQ ID NO: 3497 - protein, 222 aa, Setaria italica
IENKISRQVTFAERRNGLLKKAYELSLLCDAEVALIIFSGRGRLFEFSSSSCMYKTLERYRSSNYGSQEIKTPLDGEINYQDYLKLKTRVEFLQTTQRNILGEDLGPLSMKELEQLENQIEIFLKHIRTRKNQMLLDQLFDLKSKEQELQDLNKDLRKKLQETNAESVLHVSWEEGGHSGTSGNAIEPYQGFLQHPDNDPSLQIGYHQQAYMDQLNNEDMGD

SEQ ID NO: 3498 - protein, 115 aa, Glycine max
MMVQKEDLGLSLSLNFPHHSTPNPQHLSLMSSSTHSSSPSGFNPQKPSWNEAFASSDPDRNSDTCRGETRSFLRGIDVNRLPSAVDAEEEAGVSSPNSTVSCVSGKRSEREPNGE

SEQ ID NO: 3499 - protein, 203 aa, Oryza sativa (japonica cultivar-group)
VNKSFPIHPFHQGKETSDPENGRQCPFFDELHAVFTERARTMQQQLLESESGPSVKKKLKRPSGDLSSEDSDDEEDGSGDSGDEKPIRSRKRKIADKRQQSQRMAEKSRTSISSIHELLQDFLVQQQRMDIQWHEMMERRSQERIVFEQEWRQSMQKLEQERLMLEHTWMEREEQRRMREEARAEKRDALLTTLLNKVLQEDL

SEQ ID NO: 3500 - protein, 111 aa, Citrus limon
METSVPYENDLNLKATELRLGLPGSDENEQQTRNNKRSLPDTPDDLDTKDKSDEAASVAKAQVVGWPPIRSYRKNSLQQKKNEGECAGIYVKVSMDGAPYLRKIDLKLYNG

SEQ ID NO: 3501 - protein, 236 aa, Oryza sativa (indica cultivar-group)
MASPEGSTWVFDCPLMDDLAAAAGFDAAPAGGFYWTTPAPPQAALQPPPPPQQPVAPATAAPNACPRSESGTRPSSKACREKVRRDKLNERFLELGAVLEPGKTPKMDKSSILNDAIRVMAELRSEAQKLKESNESLQEKIKELKAEKNELRDEKQKLKAEKESLEQQIKFLNARPSFVPHPPVIPASAFTAPQGQAAGQKLMMPVIGYPGFPMWQFMPPSDVDTTDDTKSCPPVA

SEQ ID NO: 3502 - protein, 229 aa, Oryza sativa (japonica cultivar-group)
MMGATSPSGLELTMAVPGLSSSGSEGAGCNNNNAGGGCNMRDLDINQPASGGEEEEFPMGSVEEDEEERGVGGPHRPKKLRLSKEQSRLLEESFRLNHTLTPKQKEALAIKLKLRPRQVEVWFQNRRARTKLKQTEMECEYLKRCFGSLTEENRRLQREVEELRAMRVAPPTVLSPHTRQPLPASALTMCPRCERITAATGPPAVRPPPSSAAAAAPSPFHPRRPSAAF

SEQ ID NO: 3503 - protein, 322 aa, Oryza sativa (indica cultivar-group)
VVATADPSAADSARDNKRMRTGGGSTSSSSSSSSSLGGGASRGSVVEAAPPATQGAAAANAPAVPVVVVDTQEAGIRLVHALLACAEAVQQENFAAAEALVKQIPTLAASQGGAMRKVAAYFGEALARRVYRFRPADSTLLDAAFADLLHAHFYESCPYLKFAHFTANQAILEAFAGCRRVHVVDFGIKQGMQWPALLQALALRPGGPPSFRLTGVGPPQPDETDALQQVGWKLAQFAHTIRVDFQYRGLVAATLADLEPFMLQPEGEADANEEPEVIAVNSVFELHRLLAQPGALEKVLGTVHAVRPRIVTVVEQEANHNS

SEQ ID NO: 3504 - protein, 304 aa, Oryza sativa (japonica cultivar-group)
MGAPKQKWTSEEEEALRRGVLKHGPGKWRTIQKDPEFSPVLSSRSNIDLKDKWRNLSFSASGLGSRDKLKVPRIKGPSSSTSPSSQTPLLVLPPNKVAEASPSADPEKSSQDVKIPNSMVIEALCEIGDPNGSDVDAICHYIEQRHEVQANFRRLLTAKLRRLIAAKKIEKIDRSYRITESYAAKVSQANKSPSPKKDPAKPLKASQNLGSFAGTSPALEAAAAAAMKVADAEAKSHLANEHMTEAERIFKLAEETESLVTLATEIYERCSRGEILTIMQVAQSNFEFQSVSGNGSGTGSTVLA

SEQ ID NO: 3505 - protein, 160 aa, Triticum aestivum
MQRQRFGSDEGPGRNPAEERRLKRPATESEETGDDDELPPGTRRKMKDTQQKTRPSGSTAAGAGAASSASSVRAVLQDFLEQQQRLDAQRQEAAARHAQERLAFEQQWRQEMQRLERERLMLEQAWREREEQRRMREEARAERRDALLTNLLNKLLRDDF

SEQ ID NO: 3506 - protein, 322 aa, Oryza sativa (indica cultivar-group)
VVATADPSAADLARDTKRMRTGGGSTSSSSSSSSSLGGGASRGSVVEAAPPATQGAAAANAPAVPVVVVDTQEAGIRLVHALLACAEAVQQENFAAAEALVKQIPTLAASQGGAMRKVAAYFGEALARRVYRFRPADSTLLDAAFADLLHAHFYESCPYLKFAHFTANQAILEAFAGCHRVHVVDFGIKQGMQWPALLQALALRPGGPPSFRLTGVGPPQPDETDALQQVGWKLAQFAHTIRVDFQYRGLVAATLADLEPFMLQPEGEADANEEPEVIAVNSVFELHRLLAQPGALEKVLGTVHAVRPRIVTVVEQEANHNS

SEQ ID NO: 3507 - protein, 118 aa, Pinus pinaster
KPFMTEALWVLYITGVKHFRLYPRTYDLLHAWHIFSDINERGCSIEDLLLEMDRILRPTGFIIIRDKAAIVNYIMKYLAPLRWDSWSSNVEPESDPLSSGDEIVLMARKRLWLPGETH

SEQ ID NO: 3508 - protein, 415 aa, Schizosaccharomyces pombe 972h-
MNSIPDSYSLKQGFPEGLGEYVDPSGNPNSQVRIGYGQDSVSRFQQPVPDVDPTAVNHYNASAPIEVASPFDNVTQGLVGSDAQALAEYWQKTIDTLEHDDQAVKTLHLPLARIKKVMKTDDDVKNKMISAEAPFLFAKGSEIFIAELTMRAWLHAKKNQRRTLQRSDIANAVSKSEMYDFLIDIISKDNNNSRASSSQAHMSATQVAAMGGMNGLQPFPTQAGLPNQGFPMPTGSQLPFSNQQSSQPSMQYSSHPSRMQQMQDIDQSMYKQQRLGSEYPQLQMSDNSGNVNQMNMQRPVMVAPYMAEHLYRYPPTHLESGSSAFRLQSSPMGYQMPQFQGNMRPNMQQSQMFDPSAYGMSRRPGSPRQFDQQQRLYSQPNAMMYQTQQGRQGNPMHQQFSQQQNPLSRYSQQPQ

SEQ ID NO: 3509 - protein, 546 aa, Avena sativa
MYRVKSESDCEMMHEDQMDSPLADDGGSSGGSPHRGGGPPLKKGPWTSAEDAILVDYVKKHGEGNWNAVQKNTGLFRCGKSCRLRWANHLRPNLKKGAFTPEEERLIIQLHSKMGNKWARMAANLPGRTDNEIKNYWNTRIKRCQRAGLTIYPASIINQSANEDQQGSSDFNCGENLSNNLLNGNGLYLPDFTCDNFIANSEALSYAPQLSAASISNLLGQSFASKGCGFMDQAGMLKQSDSLLPGLSDTINGALSSVDQFSNDSEKLKQALGFDYLHEANSSSRIIAPFGGALTGSHAYLNGTFSASRSTNGPLKMELPSLQDTESDPNSWLKYTVAPTMQPTELVDPYLHSPAPTPSVKSECASPRNSGLLEELIHEAEALRSGKNQQPSVRSSSSSVSTPCDTTVVSPEFDLCQEYWEEHPSTMLVQEYAPFSGTESTAPASAASPDVFQLSKISPAESHSLGSGEQVMEPSYEPGAGDTPPHPENLRPDAFFSGNTSDSSLFNNAIAMLLGNDLNTECKPVLFDPSSWSNMPHACQMSEEFK

SEQ ID NO: 3510 - protein, 91 aa, Oryza sativa (indica cultivar-group)
MSSRSSSSSRNSNSVNMDSEWSKKENKLFEEALAYYGEGAPDLFHKVSRAMGGTKTADEVRRHYEILEDDLKLIEARRVPFPKYNTQGAWN

SEQ ID NO: 3511 - protein, 271 aa, Catharanthus roseus
MDQQASYNLAGDTVPYNLAEIWPFPMNSATAATSFHNNNNAANSLAAAAAAGISMNMNVNLSVNRDHDPMVMDQAPNLNGGVRRRREDDDSAKGVSTSNDANAMNEGDNKRLKTGGSNENHESKAEGEETAKPAEPPKQDYIHVRARRGQATDSHSLAERARREKISERMKILQDLVPGCNKVIGKALVLDEIINYIQSLQRQVEFLSMKLEAVNSRLSPGIEGFPSKEFGQPPYDPSGMAFGSQSSREYGRDTSPEWLHMQIGGGFERTT

SEQ ID NO: 3512 - protein, 127 aa, Sorghum bicolor
MGKGRAPCCAKVGLNKGSWTPEEDMRLIAYIQKYGHANWRALPKQAGLLRCGKSCRLRWINYLRPDLKRGNFTADEEETIIKLHAMLGNKWSKIASCLPGRTDNEIKNVWNTHLKKPVFPACGWERT

SEQ ID NO: 3513 - protein, 253 aa, Brassica napus
  misc_feature (113)..(113): Xaa can be any naturally occurring amino acid
PGFGLMAGREAARKSRLRKKAYVQQLESSRIKLSQLEQELQRARSQGMFIGGCGPPGPNITSGAAIFDMEYGRWLEEDNRHMSEIRTGLQAHLSDNDLRLIVDGYIAHFDEVXRLKAVAAKADVFHLIIGTWMSPAERCFIWMAGFRPSDLIKILVSQMDLLTEQQLMGIYSLQHSSQQAEEALSQGLEQLQQSLIDTLAASPVMDGMQQMAVALGKISNLEGFIRQADNLRQQTVHQLRRILTVRQAARCFL

SEQ ID NO: 3514 - protein, 327 aa, Triticum aestivum
  misc_feature (50)..(50): Xaa can be any naturally occurring amino acid
  misc_feature (124)..(124): Xaa can be any naturally occurring amino acid
  misc_feature (189)..(189): Xaa can be any naturally occurring amino acid
MIQAMASQSQAGGGGGGGYAGPGQRGQAQGLARQGSLYSLTLDEVPSPAXEPLLSMNLDELLKSVFPDGVDPVGGVAGQSEPAPGLHRQGSITMPPELSKKTVDEVWKGIQDSPKRSGEEGIRXGRERQPTFGEMTLEDFLVKAGVVAEGHLKDPIDLPANMGAVGSSVTAAAPSLNPGAHWLQQYLEXPQHPSMAGPFMASHLGPQPLSVATGAIMEPIYPDGQITSPMLDALSDPQTPRRKRGASDGVTDKVVERRQKRMIKNRESAARSRARKQAYTNELENKVSRLEEENERLKKQKELDMMITSAPPPEPKYQLRRTSSAPV

SEQ ID NO: 3515 - protein, 983 aa, Arabidopsis thaliana
MEEKRRDSAGTLAFAGSSGDSPASEPMPAPRRRGGGLKRKANALGGSNFFSSAPSKRMLTREKAMLASFSPVHNGPLTRARQAPSIMPSAADGVKSEVLNVAVGADGEKPKEEEERNKAIREWEALEAKIEADFEAIRSRDSNVHVVPNHCGWFSWEKIHPLEERSLPSFFNGKLEGRTSEVYREIRNWIMGKFHSNPNIQIELKDLTELEVGDSEAKQEVMEFLDYWGLINFHPFPPTDTGSTASDHDDLGDKESLLNSLYRFQVDEACPPLVHKPRFTAQATPSGLFPDPMAADELLKQEGPAVEYHCNSCSADCSRKRYHCPKQADFDLCTECFNSGKFSSDMSSSDFILMEPAEAPGVGSGKWTDQETLLLLEALEIFKENWNEIAEHVATKTKAQCMLHFLQMPIEDAFLDQIDYKDPISKDTTDLAVSKDDNSVLKDAPEEAENKKRVDEDETMKEVPEPEDGNEEKVSQESSKPGDASEETNEMEAEQKTPKLETAIEERCKDEADENIALKALTEAFEDVGHSSTPEASFSFADLGNPVMGLAAFLVRLAGSDVATASARASIKSLHSNSGMLLATRHCYILGDPPDNKKDPTKSKSADAEGNDDNSHKDDQPEEKSKKAEEVSLNSDDREMPDTDTGKETQDSVSEEKQPGSRTENSTTKLDAVQEKRSSKPVTTDNSEKPVDIICPSQDKCSGKELQEPLKDGNKLSSENKDASQSTVSQSAADASQPEASRDVEMKDTLQSEKDPEDVVKTVGEKVQLAKEEGANDVLSTPDKSVSQQPIGSASAPENGTAGGNPNIEGKKEKDICEGTKDKYNIEKLKRAAISAISAAAVKAKNLAKQEEDQIRQLSGSLIEKQLHKLEAKLSIFNEAESLTMRVREQLERSRQRLYHERAQIIAARLGVPPSMSSKASLPTNRIAANFANVAQRPPMGMAFPRPPMPRPPGFPVPGSFVAATTMTGSSDPSPGSDNVSSV

SEQ ID NO: 3516 - protein, 190 aa, Triticum aestivum
GIAVNCMNSLRGVVPGGARRRGAFAASLRRLEPRVVTVVEEEADLVATDPDASDEGGDTEAAFLKVFGEGLRFFSAYMDSLEESFPKTSNERLALERGAGRAIVDLVSCPASESMERRETAAAWARRLRSAGFSPVPFSEDVADDVRSLLRRYREGWSMREAGTDDSAAGAGVFLAWKEQPLVWASAWRP

SEQ ID NO: 3517 - protein, 387 aa, Oryza sativa (japonica cultivar-group)
MELGLSLGDAVTVADGGRLELVLGLGVGVGAGVRRGEEEERGRREDVVGAGRWAAMAAASPEPSVRLSLVSSLGLHWPSETGRSEAAARGFDVNRAPSVAAGAPGMEDDEEGPGAAPALSSSPNDSGGSFPLDLSGQGLRGHAEAAAQGGGGGGGGERSSSRASDDDEGASARKKLRLSKEQSAFLEESFKEHSTLNPLLLFLEYARTRECLFLLARSWPLTLMLLTGGEQKQKVALAKQLNLRPRQVEVWFQNRRARTKLKQTEVDCEYLKRCCETLTEENRRLHKELAELRALKTARPFYMHLPATTLSMCPSCERVASNPATASTSAPAAATSPAAAPTAAARTAVASPEPHRPSSFAALFAAPLGFPLTAAQPRPPPPASNCL

SEQ ID NO: 3518 - protein, 304 aa, Zea mays
MGVESECDRIKGPWSPEEDEALRRLVERHGARNWTAIGRGIPGRSGKSCRLRWCNQLSPQVERRPFTPEEDAAILAAHARLGNRWAAIARLLPGRTDNAVKNHWNSSLKRKLATATATSSGSDAERACKRASPGPGSPTASDRSDLSHGCGAAQVFRPVPRAGGFDAISAADVRPPPPPAVADEDPLTSLSLSLPGLDQSPSGFHHDSARSHFQELSPSSSPSPQSTPPAFPPQAAPSQSSYAFSGELVAAMQEMIRAEVRKYMSGAGLRAGCGPGAVGEVCMPQLVEGVMRAAAERVGVVTRP

SEQ ID NO: 3519 - protein, 308 aa, Zea mays
MESGRLIFNAPGSGAGQMLFLDCGAGGGPGGGLLHRGGRPMLGLEEGRGVKRPFYTSPDELLEEEYYDEQLPEKKRRLTPEQVHLLERSFEEENKLEPERKTELARKLGLQPRQVAVWFQNRRARWETKQLERDFDRLKASFDALRADHDALLQDNNRLRSQVINHLQDSKQASFLPFVWLWLWPRSKHVADGRLRDCGFIKVVSLTEKLQEKEDATEGGATADTAAPAGDVEASLADDVEEPAEPAATFEVLQEVKSEDRLSTGSGGSAVVDADALLYGRFAAAVDSSVESYFPGGEDHYHDCGTMG

SEQ ID NO: 3520 - protein, 224 aa, Arabidopsis lyrata
MRIRRREEKENQEYKKGLWTVEEDNILMDYVLNHGTGQWNRIVRKTGLKRCGKSCRLRWMNYLSPNVNKGNFTEQEEDLIIRLHKLLGNRWSLIAKRVPGRTDNQVKNYWNTHLSKKLVGDYSSAVKTTGEDDDSLPSLFITAATTSSRHHQQENVYENIAKSFDGVVSASYEDKPKQELAQNDVLMATTNDPSHYYGNNALWVHDDDFELSSLFTRNDEFCFW

SEQ ID NO: 3521 - protein, 223 aa, Arabidopsis lyrata
MRIRRREEKENQEYKKGLWTVEEDNILMDYVLNHGTGQWNRIVRKTGLKRCGKSCRLRWMNYLSPNVNKGNFTEQEEDLIIRLHKLLGNRWSLIDKRVPGRTDNQVKNYWNTHLSKKLVGDYSSAVKTTGEDDDSLPSLFITAATTSCHHQQENVYENIAKSFDGVVSASYEDKPKQELAQNDVLMATTNDPSHYYGNNALWVHDDDFELSSLFTRNDEFCFW

SEQ ID NO: 3522 - protein, 419 aa, Arabidopsis thaliana
MIDYERSNTTKNINTHHHNPPPSSSSSDLLPDGNGTAVTQKRKRRPAGTPDPEAEVVSLSPRTLLESDRYVCEICNQGFQRDQNLQMHRRRHKVPWKLLKRETNEEVRKRVYVCPEPTCLHHNPCHALGDLVGIKKHFRRKHSNHKQWICERCSKGYAVQSDYKAHLKTCGTRGHSCDCGRVFSRVESFIEHQDTCTVRRSQPSNHRLHEQQQHTTNATQTASTAENNENGDLSIGPILPGHPLQRRQSPPSEQQPSTLLYPFVTNGSIELQLLPSRNCADETSLSLSIGTMDQKTMSEVEKKSYEKGETSLEREEARRETKRQIEIAELEFAEAKRIRQHARAELHKAHLFREEASRRISATMMQITCHNCKQHFQAPAALVPPPPQTHCTDESTSLAVSYMSSATTEGEKASDRASS

SEQ ID NO: 3523 - protein, 493 aa, Oryza sativa
MAALRQGDDPAIKLFGRTIPLLLDPPAAAAAAADEENSVLENSVLSFLDFLATFGVMPNLGNGVKTNNDLPLVSDKLLIVKGIPFCPNNSKKNDLQGISRPDGRIEIDSMTEDVKTEPDGSVPEKILKKPDKILPCPRCNSMETKFCYFNNYNVHQPRHFCRNCQRYWTAGGAMRNVPVGAGRRRNKHVSKYCQAMMTCNNTVAPGDVSDVVHHQVITHGSSLLPATLKENETPTEFISEVPPCKSSASILDIGEPNDTDLVPLASGDNKEEKSCASSVVVSSCSENLMPDNAIMKEPNNRSGCCNGVALPFPTGPALVLPWSLGWNSVALMPATQCSMQPVLGLKDGIPCPPSWPPQLMVPAPGICTPVVPIPLVPPLWSCFPGWPNGMWNAQCPGGSSSLVLGKHSREESLQEEEKTRNYLWVPKTLRIDDPAEAAKSSIWATLGIKPDDKGIFKSFQPNVAKNGTAPESPQALQANPAAFSRSQSFQETT

SEQ ID NO: 3524 - protein, 322 aa, Oryza sativa (indica cultivar-group)
VVATADPSAADSARDTKRMRTGGGSMSSSSSSSSSLGGGASRGSVVEAAPPATQGAAAANAPAVPVVVVDTQEAGIRLVHALLACAEAVQQENFAAAEALVKQIPTLAASQGGAMRKVAAYFGEALARRVYRFRPADSTLLDAAFADLLHAHFYESCPYLKFAHFTANQAILEAFAGCRRVHVVDFGIKQGMQWPALLQALALRPGGPPSFRLTGVGPPQPDETDALQQVGWKLAQFAHTIRVDFQYRGLVAATLADLEPFMLQPEGEADANEEPEVIAVNSVFELHRLLAQPGALEKVLGTVHAVRPRIVTVVEQEANHNS

SEQ ID NO: 3525 - protein, 208 aa, Brassica napus
  misc_feature (196)..(196): Xaa can be any naturally occurring amino acid
MEINSNSTTLPPGFRFHPTDEELIVHYLRNQTMSKPCPVSIIPEVDIYKFDPWQLPDLTEFGENEWYFFSPRERKYPNGVRPNRAAVSGYWKATGTDKAIHSGSSNVGVKKALVFYKGRPPKGIKTDWIMHEYRLHDSRKASTKLKGSMRLDEWVLCRIYKKRGAGKLLDEKEGSMDDVQIDETLVAVTNEAKRRXEEEIMMMTSTKL

SEQ ID NO: 3526 - protein, 106 aa, Mimulus nasutus
QTNRQVTYSKRRNGLFKKAHELTVLCDAKVSILMISSTQKLHEYISPSITTKQMFDQCQKAVGVDVWNTHYERMQEHLKKLKDVNRNLRTEIRQRIGESLNDLGYE

SEQ ID NO: 3527 - protein, 322 aa, Oryza rufipogon
VVATADPSAADSARDTKRMRTGGGSTSSSSSSSSSLGGGASRGSVVEAAPPAMQGTAAANAPAVPVVVVDTQEAGIRLVHALLACAEAVQQENFAAAEALVKQIPTLAASQGGAMRKVAAYFGEALARRVYLFRPADSTLLDAAFADLLHAHFYESCPYLKFAHFTANQAILEAFAGCRRVHVVDFGIKQGMQWPALLQALALRPGGPPSFRLTGVGPPQPDETDALQQVGWKLAQFAHTIRVDFQYRGLVAATLADLEPFMLQPEGEADANEEPEVIAVNSVFELHRLLAQPGALEKVLGTVHAVRPRIVTVVEQEANHNS

SEQ ID NO: 3528 - protein, 154 aa, Kluyveromyces lactis NRRL Y-1140
MSSQKIDLTQLNPEQLTVVKQQIDQELQHFTQSLHALNMARSKFKECIDDIKTVSRDDNANQNLLVPLSGSLYVSGKIQDNKKFMVDVGTGYYVDKSAEDAIQFYQKKVDKLNKESLQIQEIIKEKNQSSLAIENQLRIAAIKQHEQMAAAQKS

SEQ ID NO: 3529 - protein, 234 aa, Triticum aestivum
  misc_feature (32)..(32): Xaa can be any naturally occurring amino acid
  misc_feature (55)..(55): Xaa can be any naturally occurring amino acid
  misc_feature (63)..(63): Xaa can be any naturally occurring amino acid
  misc_feature (82)..(82): Xaa can be any naturally occurring amino acid
  misc_feature (121)..(121): Xaa can be any naturally occurring amino acid
GGPPRGGGAPCLQGWPKRNDSPPPVSRGRTLXLCLLNVSPGGKQVVQAPHPDCFXAPGPAEFXCSVWGNSFSFYQGGGGHQXSHPVKQPSPSPDAAAGPMVALPAVAPVLPSAERATWSTXAGSSDGTTNRVHRCSICPKEFPTGQALGGHKRKHYDGGVGSVAPSSTELLAPAAAESEVGSTGNGSSAARAFDLNIPAVPEFVWRPCPKGKMWEDEEEVQSPLPFKKPRLLTA

SEQ ID NO: 3530 - protein, 266 aa, Brassica napus
MALEAMNCPTNSSSFTAREDRNEPTDDLTNDAVFMEPWLKRKRSKRQRSGSPSSSPPRSRPKSQIQDLAEEEYLALCLLMLANNHHQPKRRPQESTTKLSHKCSVCGKAFPSYQALGGHKASHRIKPPTTTADDDSTPPSIAVAKHPTSTAIAPSGKIHECSICHKVFPTGQALGGHKPCHYEGNLGGGGGGSKSVSPSGSVSSTVSEGRSTRVIIDLNLPALPELSLHPDSVVDEKILSPLTGKKPLLLAGPAQVIKKKDLSLRI

SEQ ID NO: 3531 - protein, 158 aa, Hyacinthus orientalis
KSKADTSNKADAKLSVKRKAAEKPAKKPAPAKKSKAVKDPNKPKRPPSAFFVFMEDFRKQFKEKNPNNKQVSVVGKACWGKWKTMSAAEKAPFEARAAKRKADYNKVMVAYNKKQSEGGGKKSAEEEDDEESDKSKSEVHDDEDDDESGDDDDEDDDE

SEQ ID NO: 3532 - protein, 195 aa, Brassica napus
MMSSTSPTQLASLRDMGIYEPFQQMVSWGNVFKSDINDHSPNTASSSVIQVDHNINKASYPSSSHNQIEAEPSSNDHQEEDDDGRNHDKMKRRLAQNREAARKSRLRKKAYVQQLEESRLKLSQLEQELEKAKQQGVYSSGSSYVGSSGSINSSIAAFELEYSHWLEEQSRRGSEIRTALQAHISDIELKMLVES

SEQ ID NO: 3533 - protein, 351 aa, Brassica oleracea
MTRRCSHCNHNGHNSRTCPNRGVKLFGVRLTEGSIRKSASMGNLSHYTGSGSGGHGSGSPGDVPDHVAGGDGYASEDFVAGSSSSSRERKKGTPWTEEEHRMFLLGLQKLGKGDWRGISRNYVNTRTPTQVASHAQKYFIRQSNVSRRKRRSSLFDMIPDEGEDVPMDQQEPEAENTPVETLMQSSDSVHQTLAFSSRQAPSILEIDECESMDSTNSTTGEPSSIAAAASSSTSILEETTQPQLQSFPILYPAYFSPYYPFPYPIWPAGYVPEPTKKEETHEILRPTAVHSKAPINVDELLGMSKLSLGESKKKNGESDQSLSLKLGTRQSAFQPNPSSDSSDITNVVHAV

SEQ ID NO: 3534 - protein, 558 aa, Candida albicans SC5314
MGVSDDDNISFEYDDDVDNDESEISFVSEDENDGNNLEPPNKKSKSTYNGNGVDDDSVVAGFNGTIYRPWTFEEFIEQRFLNPLKKLEKVHLNGCTEDDLLIMLQYKKWNSDEVINSFFESHDKLMEKCGLPVGKPSNNTFEEVDNYDCFICCESYPKTTVYSLTCGHQFCFSCYQQYIGNEIVRGELITCMDPECHYTIPHRDIDQFYAPKDKEKNLIVTVKSLSSNPLLHSAARYLVNSKPKYTHCPATDCTSFAEILDDFKCSSSQLFTEKSSDRNVDLSRVPIIGCSEHHEFCFNCKYENHLPCPCWVSKRWIKKCNDDSETAHWIDANTHSCPKCYSSIEKNGGCNHMTCQKCKYEFCWVCLKDWSDHRNNYSCNRFRDSRVEDQIRKNRSRQTLERYLHFYKRYFIHENSMKGDQRILKKIDDVTRLYMEDRRENGSTYLSWNDIQFLPDAMKSLQNGRKTLKWTYAFAYYLSKSNFSDIFEFNQDFLNRTVEDLSEIFEKIMDKRNKNKVGTILKNKAKIINLSELVNARRTTLIESAEENLQKGLLSFQP

SEQ ID NO: 3535 - protein, 294 aa, Arabidopsis thaliana
MSCNNGMSFFPSNFMIQTSYEDDHPHQSPSLAPLLPSCSLPQDLHGFASFLGKRSPMEGCCDLETGNNMNGEEDYSDDGSQMGEKKRRLNMEQVKTLEKNFELGNKLEPERKMQLARALGLQPRQIAIWFQNRRARWKTKQLEKDYDTLKRQFDTLKAENDLLQTHNQKLQAEIMGLKNREQTESINLNKETEGSCSNRSDNSSDNLRLDISTAPPSNDSTLTGGHPPPPQTVGRHFFPPSPATATTTTTTMQFFQNSSSGQSMVKEENSISNMFCAMDDHSGFWPWLDQQQYN

SEQ ID NO: 3536 - protein, 345 aa, Glycine max
MASGKLYAGGTRSLLLQNERLPCSSEVLESLWAQTSNPASFQGSKPVVDFENVSGSRMTDRPFFQALEKEENCDEDYEGCFHQPGKKRRLTSEQVQFLERNFEVENKLEPERKVQLAKELGLQPRQVAIWFQNRRARFKTKQLEKDYGVLKASYDRLKSDYESLVQENDKLKAEVNSLESKLILRDKEKEENSDDKSSPDDAVNSSSPHNNKEPMDLLIISKNATTTTTSENGTKVLSPLPLPIMVTCCKQEDANSAKSDVLDSDSPHCTSFVEPADSSHAFEPEDHSEDFSQDEEDNLSENLLMTFPSSCCLPKVEEHCYDGPPENSCNFGFQVEDQTFCFWPY

SEQ ID NO: 3537 - protein, 286 aa, Oryza sativa
  misc_feature (51)..(51): Xaa can be any naturally occurring amino acid
  misc_feature (155)..(155): Xaa can be any naturally occurring amino acid
MMSMMTDLSCGPSSMTELTAAAAPAGSGSSAAVAAGSSEKMGRGKIEIKRXENTTNRQVTFCKRRNGLLKKAYELSVLCDAEVALIVFSSRGRLYEYANNSVKSTVERYKKANSDTSNSGTVAEVNAQHYQQESSKLRQQISSLQNANSLTRLAXNISSRTIVGDSINTMSLRDLKQVENRLEKGIAKIRARKNELLYAEVEYMQKREVELQNDNMYLRSKVVENERGQQPLNMMGAASTSEYDHMVNNPYDSRNFLQVNIMQQPQHYAHQLQPTTLQLGQQPAFN

SEQ ID NO: 3538 - protein, 327 aa, Triticum aestivum
MGMPAVRRRERDAEAELNLPPGFRFHPTDDELVEHYLCRKAAGQRLPVPIIAEVDLYRFDPWALPDRALFGTREWYFFTPRDRKYPNGSRPNRAAGNGYWKATGADKPVAPRGGRTMGIKKALVFYAGKAPKGVKTDWIMHEYRLADAGRAAASKKGSLRLDDWVLCRLYNKKNEWEKMQLQQQGGEEMMVEPKEEHAASDMVVTSHSHSQSQSHSHSWGEARTPESEIVDNDPSLFQQAAAFQAQSPAAAAAHQEMMATLMVPKKEAADEAGRNDLFVDLSYDDIQSMYNGLDMMPPGDDLLYSSLFASPRVRGSQPGAGGMPAPF

SEQ ID NO: 3539 - protein, 322 aa, Oryza rufipogon
VVATADPSAADSARDTKGMRTGGGSTSSSSSSSSSLGGGASRGSVVEAAPLATQGTAAANAPAVPVVVVDTQEAGIRLVHALLACAEAVQQENFAAAEALVKQIPTLAASQGGAMRKVAAYFGEALARRVYLFRPADSTLLDAAFADLLHAHFYESCPYLKFAHFTANQAILEAFAGCRRVHVVDFGIKQGMQWPALLQALALRPGGPPSFRLTGVGPPQPDETDALQQVGWKLAQFAHTIRVDFQYRGLVAATLADLEPFMLQPEGEADANEEPEVIAVNSVFELHRLLAQPGALEKVLGTVHAVRPRIVTVVEQEANHNS

SEQ ID NO: 3540 - protein, 211 aa, Oryza sativa (japonica cultivar-group)
MLSHVEMAPAAGGFKLFGKVIMQCGVSEGTQDKAQGFVVAREKVEPEEEEEEEQRVPAAATSGQRASIKREAADRDEEQRQGGGDAAGQPTQRRLQDSAEARAAAAAPLPCPRCRSRDTKFCYFNNYNVNQPRHFCKACHRYWTAGGALRNVPVGAGRRKNRPLGPLAVAHHNHHHRAAAGFVLGFPNPSSPTSPSPVYTDRWPVTPDRPF

SEQ ID NO: 3541 - protein, 498 aa, Zea mays
  misc_feature (51)..(51): Xaa can be any naturally occurring amino acid
  misc_feature (63)..(63): Xaa can be any naturally occurring amino acid
  misc_feature (115)..(115): Xaa can be any naturally occurring amino acid
  misc_feature (405)..(405): Xaa can be any naturally occurring amino acid
  misc_feature (452)..(452): Xaa can be any naturally occurring amino acid
  misc_feature (462)..(462): Xaa can be any naturally occurring amino acid
  misc_feature (485)..(485): Xaa can be any naturally occurring amino acid
MDCGPPDQLPPSSAPACFLNLNWDQSMAAATGRATTSTWVSSPASNSTGGXGLALHGISPQPXYGGTPLSSPRKLNLSMMGQFHHYPPMGHLDQFLADPGFAARAARLSGFDGPXGGSGYGGAVPGQFGLPDAGPIGGALRELELGNGRDESSVSDPASASAEMALKAPSDGNAKKRKASGKGKGKDGPGSTAATKVRAQLRCSGSPIPPPHAATRFRSGAKRFHSGRVPQEESSGKRCKSAEESNGAEENSGKGKAAAQSNSDNGGKKQGKDGASKPPEPPKDYIHVRARRGEATDSHSLAERVRREKISQRMKLLQDLVPGCNKVVGKAVMLDEIINYVQSLQRQVEFLSMKLATVNPQLDFNNLPNLLPKDMHQSCGPLQNSHFPLETSGAPLPYLNQGNPXLIGCGLPNGMDNSQSSMHPLDPAFCRPMSSQQHPFLNGVSDAASKVXLSGKMTFRAXSTWIWGSRASRRWLPPPPTATTXFVANSAHENGALT

SEQ ID NO: 3542 - protein, 178 aa, Zea mays
MAYQMELGGESSPQRKAGRGKIEIKRIENTTNRQVTFCKRRNGLLKKAYELSVLCDAEVALIVFSSRGRLYEYSNNSVKGTIERYKKAISDNSNTGSVAEINAQYYQQESAKLRQQIISIQNSNRQLMGETIGSMSPKELRNLEGRLDRSVNRIRSKKNELLFAEIDYMQKRSVQEVD

SEQ ID NO: 3543 - protein, 323 aa, Arabidopsis thaliana
MVGLDDAASKLGVERRRIYDIVNVLESVGVLTRRAKNQYTWKGFSAIPGALKELQEEGVKDTFHRFYVNENVKGSDDEDDDEESSQPHSSSQTDSSKPGSLPQSSDPSKIDNRREKSLGLLTQNFIKLFICSEAIRIISLDDAAKLLLGDAHNTSIMRTKVRRLYDIANVLSSMNLIEKTHTLDSRKPAFKWLGYNGEPTFTLSSDLLQLESRKRAFGTDITNVNVKRSKSSSSSQENATERRLKMKKHSTPESSYNKSFDVHESRHGSRGGYHFGPFAPGTGTYPTAGLEDNSRRAFDVENLDSDYRPSYQNQGAYILFTSI

SEQ ID NO: 3544 - protein, 322 aa, Oryza rufipogon
VVATADPSAADSARDTKRMRTGGGSTSSSSSSSSSLAGGASRGSVVEAAPPATQGAAAANAPAVPVVVVDTQEAGIRLVHALLACAEAVQQENFAAAEALVKQIPTLAASQGGAMRKVAAYFGEALARRVYRFRPADSTLLDAAFADLLHAHFYESCPYLKFAHFTANQAILEAFAGCRRVHVVDFGIKQGMQWPALLQALALRPGGPPSFRLTGVGPPQPDETDALQQVGWKLAQFAHTIRVDFQYRGLVAATLADLEPFMLQPEGEADANEEPEVIAVNSVFELHRLLAQPGALEKVLGTVHAVRPRIVTVVEQEANHNS

SEQ ID NO: 3545 - protein, 79 aa, Brassica napus
  misc_feature (2)..(2): Xaa can be any naturally occurring amino acid
  misc_feature (18)..(18): Xaa can be any naturally occurring amino acid
  misc_feature (42)..(42): Xaa can be any naturally occurring amino acid
  misc_feature (51)..(51): Xaa can be any naturally occurring amino acid
  misc_feature (64)..(64): Xaa can be any naturally occurring amino acid
  misc_feature (71)..(71): Xaa can be any naturally occurring amino acid
MXSNSMSSNTSWTRKENXLFERALAIYEQDTPDRWHNVARAXGGKSAEEVXRHYELLVRDVNDXESGRYPXPTYRSNGN

SEQ ID NO: 3546 - protein, 303 aa, Oryza sativa (japonica cultivar-group)
MSGGQDLQLPPGFRFHPTDEELVMHYLCRRCAGLPIAVPIIAEIDLYKFDPWQLPRMALYGEKEWYFFSPRDRKYPNGSRPNRAAGSGYWKATGADKPVGSPKPVAIKKALVFYAGKAPKGEKTNWIMHEYRLADVDRSARKKNSLRLDDWVLCRIYNKKGGLEKPPAAAVAAAGMVSSGGGVQRKPMVGVNAAVSSPPEQKPVVAGPAFPDLAAYYDRPSDSMPRLHADSSCSEQVLSPEFACEVQSQPKISEWERTFATVGPINPAASILDPAGSGGLGGLGGGGSDPLLQDILMYWGKPF

SEQ ID NO: 3547 - protein, 322 aa, Oryza rufipogon
VVTTADPSAADSARDTKRMRTGGGSMSSSSSSSSSLGGGASRGSVVEAAPPATQGAAAANAPAVPVVVVDTQEAGIRLVHALLACAEAVQQENFAAAEALVKQIPTLAASQGGAMRKVAAYFGEALARRVYRFRPADSTLLDAAFADLLHAHFYESCPYLKFAHFTANQAILEAFAGCRRVHVVDFGIKQGMQWPALLQALALRPGGPPSFRLTGVGPPQPDETDALQQVGWKLAQFAHTIRVDFQYRGLVAATLADLEPFMLQPEGEADANEEPEVIAVNSVFELHRLLAQPGALEKVLGTVHAVRPRIVTVVEQEANHNS

SEQ ID NO: 3548 - protein, 170 aa, Glycine max
MLSALPFQGNPFPALDYAFMPWDGLDSLGFKPTSPNPVTSSSGSGYPNRTHAEEKPASDKSNHVTSVMEERKRRRMISNRESARRSRIRKQRHLENLRNQMNLFRVENRKLNNGLQFLLHHCNRLRTENEWLLSERPMLRQKLANINQILLFRHLQPFSSAWPCNIVLAE

SEQ ID NO: 3549 - protein, 94 aa, Mimulus nasutus
RNGLFKKAHELTVLCDAKVSILMISRTQKLHEYISPSITTKQMFDQYQKAVGVDVWNTHYERMQEHLKKLKDVNRNLRTEIRQRIGESLNDLGY

SEQ ID NO: 3550 - protein, 196 aa, Pisum sativum
VEVNGLMKKAFELSILCDAEVALIVFSPRGRLYEFASSSIQETIERYRSHSRINNTQTTCESAENTQHLKEEAENMMKRIDLLETSKRKLLGEGLGTCSIEELQKIEQQLERSITKIRAKKTQVFREQIGHLKEKEKTLIAENVMLSEKYDKYSSQQAKKDDRKNIAEGEAFAASSDVETELFIGLPETRTRISPA

SEQ ID NO: 3551 - protein, 551 aa, Oryza sativa (indica cultivar-group)
MCDKDPGIKLFGRVIPLAPEAEAAAAADGSDQPEAAAAAAAEVEPAAQDEDHHKETEERKYDEMKVDVPQEEEDNEMKVDAPQEKKDNEVTADVPEEKGNDEMRVDASESIESIEPVSRSTLDNKKEDQGQMNNVEEKAASDSKDENEKTANDESGQDKVLKKPDKILPCPRCNSMDTKFCYYNNYNVNQPRHFCKNCQRYWTAGGTMRNVPVGAGRRKSKSSSLHYRHLLMAPDCMMGSRVEISKSMNPEAFASAHSTPIQPIGRNETVLKFGPEVPLCESMASVLNIQEQNGTNAAAVPTGENQEDNSCISSITSHNVLPENAAQVDKNSTPVYCNGVGPVPQYYLGAPYMYPWNIGWNNVPMMVPGTSMPESASQSESCSTSSAPWMNMNSPMMPVASRLSAPPFPYPLVPPALWGCLSSWPATAWNIPWIRTNGGCMSPSSSSNSSCSGNGSPLGKHSRDSSLPLKEDKEEKSLWVPKTLRIDDPDEAAKSSIWATLGIKPGDPGIFKPFQSKGESEGQAASETRPARALKANPAALSRSQSFQETS

SEQ ID NO: 3552 - protein, 227 aa, Zea mays
MMERVEDLGLSLSLSSSLASPRTHHVATMLLRAPEKRFLEMPLLLPAKRTTEVTGEDGLRGGSDEEDGGCGIDGSRKKLRLSKDQSAVLEDSFREHPTLNPRQKAALAQQLGLRPRQVEVWFQNRRARTKLKQTEVDCEYLKRCCETLTEENRRLQKEVQELRALKLVSPHLYMHMSPPTTLTMCPSCERVSSSNGNSAAATAAARARAGAGAGAIVCHPIDRATST

SEQ ID NO: 3553 - protein, 323 aa, Arabidopsis thaliana; identical to SEQ ID NO: 151

SEQ ID NO: 3554 - protein, 271 aa, Arabidopsis thaliana
MAFPQHGFMFQQLHEDNSQDQLPSCPPHLFNGGGNYMMNRSMSLMNVQEDHNQTLDEENLSDDGAHTMLGEKKKRLQLEQVKALEKSFELGNKLEPERKIQLAKALGMQPRQIAIWFQNRRARWKTRQLERDYDSLKKQFESLKSDNASLLAYNKKLLAEVMALKNKECNEGNIVKREAEASWSNNGSTENSSDINLEMPRETITTHVNTIKDLFPSSIRSSAHDDDHHQNHEIVQEESLCNMFNGIDETTPAGYWAWSDPNHNHHHHQFN

SEQ ID NO: 3555 - protein, 68 aa, Brassica oleracea
MERRTLKLSPQIYGQITPPTTLIMCPSCERVAGPSSSNHHQPVPINPWVACAGQVAHGLNFETLRPRS

SEQ ID NO: 3556 - protein, 493 aa, Oryza sativa (japonica cultivar-group)
MDTFPFQWPMDPAASSGLDAGFLPPPAAVAPDDGVGYYDPPAGADVDAAALPEFAAAFPPCAPDAAAAVLAMRREEEEVAGIRLVHLLMSCAGAIEAGDHALASAQLADSHAALAAVSAASGIGRVAVHFTTALSRRLFPSPVAPPTTDAEHAFLYHHFYEACPYLKFAHFTANQAILEAFHGCDHVHVIDFSLMQGLQWPALIQALALRPGGPPFLRITGIGPPSPTGRDELRDVGLRLADLARSVRVRFSFRGVAANSLDEVRPWMLQIAPGEAVAFNSVLQLHRLLGDPADQAPIDAVLDCVASVRPKIFTVIEQEADHNKTGFLDRFTEALFYYSAVFDSLDAASASGGAGNAMAEAYLQREICDIVCGEGAARRERHEPLSRWRDRLTRAGLSAVPLGSNALRQARMLVGLFSGEGHSVEEADGCLTLGWHGRPLFSASAWEAAGDGGGDNNNNSNSNVSGSSGSDSNNSGSSNGKSSGARDGSSVCL

SEQ ID NO: 3557 - protein, 108 aa, Betula platyphylla
HKRHKVCEHHPKAQVVLVGGMRQRFCQQCSRFHELSEFDETKRSCRRRLAGHNERRRKNTAESHAEGSSRKGTGTHQLKDIVCGQVDDRGRIQITIHENSTYKHFQIR

SEQ ID NO: 3558 - protein, 587 aa, Oryza sativa (japonica cultivar-group)
MGAMAMVEQEGCVENRQPLAASSSSVSDGSSYGGGGGGLAQMSPPVSSSANSISGLRRTSGPIRRAKGGWTPEEDETLRKAVEAYKGRNWKKIAECFPYRTEVQCLHRWQKVLNPELIKGPWTQEEDDQIIDLVKKYGPTKWSVIAKALPGRIGKQCRERWHNHLNPEIRKDAWTTEEEQALINAHRIYGNKWAEIAKVLPGRTDNSIKNHWNSSLRKKQDMYNTSNNMVVPKLLVHDKFKDKPKLMAMEGHLDLNKAPIINSKDQPGTAHRSNCSGFLSRSSLPTAQPLTSREASVVDGSAVTLVAQALESDSVRGKGLEIDSVHEKGLEVNSAPDHTGNSWTIQLEAAPSKGEAELSLKNEARSLGPLCYQIPNMEDVVPVSSSLFSDHLTGNHTSEHCGDDILSPAGCTTPPPTKGKLTSQLSVDSILKSAANSFPGTPSILKRRKRDKSTPVSASEMKISGSNTDRFYTPMGMEPATATPESFKTTSFLSLGSLDGSVKSFDVSPQYRARSKRMALTKTVEKQLDFSSDGLDTCGSEILNSSCNNSQSTLSITEAPKLKEKEHAVQLENLTKNFAHTTNLDVT

SEQ ID NO: 3559 - protein, 660 aa, Arabidopsis thaliana
MTPATQYPCDPEGVCMRCKSMPPPEESLTCGTCVTPWHVSCLLSPPETLSATLQWLCPDCSGETNPLPVSGVAAGYGSVGSDLVAAIHSIEADETLSAEEKAKKKQQLLSGKGVVDEDDEEEKKKTSKGKKPIDVLSHFECSFCMQSLQKPVSVRVLFALALMLVWFLESTPCGHNACLKCFLKWMGQGHRSCGTCRSVIPESMVTNPRINLSIVSAIRLARVSEKADARTSKVVHYVDNEDRPDKAFTTERAKKTGNANASSGKIFVTIPRDHFGPIPAENDPVRNQGLLVGESWKGRLACRQWGAHFPHVSGIAGQASYGAQSVVLAGGYDDDEDHGEWFLYTGSGGRILKGNKRTNTVQAFDQVFLNFNEALRLSCKLGYPVRVVRSTKDKRSPYAPQGGLLRYDGVYRIEKCWRIVGIQMCRFLFVRCDNEPAPWTSDEHGDRPRPLPNVPELNMATDLFERKESPSWDFDEGEDRWRWMKPPPASKKAVKNVLDPEERKLLREAIKSANPNTMRARLLKEFKCQICQKVMTNPVTTPCAHNFCKACLESKFAGTALVRERGSGGRKLRSQKSVMKCPCCPTDIAEFVQNPQVNREVAEVIEKLKKQEEEENAKSLDEGQCSGTSHEEEDDEQPKKRIKLDTDAEVSATVVESDMK

SEQ ID NO: 3560 - protein, 239 aa, Eriobotrya japonica
MGGGRVQLKRIENKINRQVTFSKRRTGLLKKAHEISVLCDAQVAVVVFSNKGKLFEYATDSCMEQILERYERYSYAERQLVEPEFESQGNWTFEYCRLKAKVEVLQRNHRHYLGEDLDSLTLKEIQNLEQQLDTALKQIRLRKNQLMHESISELQRKRKAIQEENNLLAKKIKEKEKAAAQPQVQDWEQQNIGLDLLPQPLPCLNNGGTQQDEFLQVRRNQLDLTLEPLYSCHLGCFAA

SEQ ID NO: 3561 - protein, 207 aa, Zea mays
SRMNSSIEIKTEGQAYHKRKRGINTSSDPASSSDNVDVDVIVDGKFEHGYIVTVIMGSKSTKAILYNCIEEPALPTPEPPVANNSTGLKGVRRRRRRRKKLSTTDPRHPKPNRSGYNFFFQDQHRILKPQYPAQDRLISKMIGERWNNLSPEDKAVYQQRGVEDKERYRTQLAAYKELRTGQPISNAVPIQQRLPLTEVTIDEVDSK

SEQ ID NO: 3562 - protein, 253 aa, Oryza sativa (japonica cultivar-group)
MAAAQQTEEDMGPPWLRPLLSTSFFVACASHPELSKNECNLFCLGCTGDALCAYCLPAHRDHHVVQIRRSSYHNVIRVSEVGKLIDISHVQTYVINSAKIVFLNGRPQARPGKGVTNTCEICCRSLPDSFRFCSLGCKLHHVSGSVISKHDSPGGLGGMRWDPSLTFAIRPKRGQDSGDGGSGSDYDSFSPKKARRAAAGYDQLGRFDRGMIRWSDDEGSKSNTAPITPTTPPISRCRPSRRKGIPHRAPFYG

SEQ ID NO: 3563 - protein, 189 aa, Lupinus hispanicus
SSGPYPYFSSSSSSYHPFAFFNPENGSSNNTFSHDPFSFPYNVPSTHHYHAPNPETVANFADCAASAAMLKNDVSGSNFGFNNFLTKKPTPKKDRHSKIYTSQGLRDRRVRLSIEIARKFFDLQDMLGFDKASNTLEWLFNKSKKAMKELARSKNSSSGVDANSFSSSDSECEVVSMINQDSIDATPEG

SEQ ID NO: 3564 - protein, 276 aa, Oryza sativa
  misc_feature (199)..(199): Xaa can be any naturally occurring amino acid
MHIYKEQEAEPSTGLMMPEPAPVASPGSGGSGGSGSVGAEKIGSRGKIEIKRIENTTNRQVTFCKRRSGLLKKAYELSVLCDAEVALVVFSSRGRLYEYSNNSVKETIERYKKANSDTSNASTVAEINAQHYQQEAAKLKQQITNLQNSNRELKQLEGRLDKGLGKIRARKNELLCAEIEYMQRRETELQNDNMYLKSXEVAESERGLQTVNMMGSASTSEYVQNMIHYDPRNFLQFNIMHQPQYYPEQEDRKAFMSGKKYSQCNIVRVHSSTNEI

SEQ ID NO: 3565 - protein, 367 aa, Arabidopsis thaliana
MKERQRWSGEEDALLRAYVRQFGPREWHLVSERMNKPLNRDAKSCLERWKNYLKPGIKKGSLTEEEQRLVIRLQEKHGNKWKKIAAEVPGRTAKRLGKWWEVFKEKQQREEKESNKRVEPIDESKYDRILESFAEKLVKERSNVVPAAAAAATVVMANSNGGFLHSEQQVQPPNPVIPPWLATSNNGNNVVARPPSVTLTLSPSTVAAAAPQPPIPWLQQQQPERAENGPGGLVLGSMMPSCSGSSESVFLSELVECCRELEEGHRAWADHKKEAAWRLRRLELQLESEKTCRQREKMEEIEAKMKALREEQKNAMEKIEGEYREQLVGLRRDAEAKDQKLADQWTSRHIRLTKFLEQQMGCRLDRP

SEQ ID NO: 3566 - protein, 179 aa, Gossypium herbaceum
GAWTAEEDRKLAEVITVHGAKRWKTIPSIAGLNRCGKSCRLRWMNYLRPNIKRGNISDQEEDLILRLHKLLGNRWSLIAGRLPGRTDNEIKNYWNSHLSKKVNQKEKHRGASARQGCKFAQQRLVENAKEQVREENTSTGFGESNISFDVDDFFDFSNVDTRNFEWVNRFLEVDDGFKF

SEQ ID NO: 3567 - protein, 189 aa, Lupinus luteus
SSGPYPYFPSSSSSYHPFAFFNPENGSSNNTLSHDPFSFPYNVPSTHHYHAPNPETVANFSDCAASAAMLKNDVSGSNFGFNNFLTKKPTPKKDRHSKIYTSQGLRDRRVRLSIEIARKFFDLQDMLGFDKASNTLEWLFNKSKKAMKELARSKNSSSGVDANSFSSSDSECEVVSMINQDSIDATPEG

SEQ ID NO: 3568 - protein, 286 aa, Brassica napus
MSELQLPPGFRFHPTDEELVMHYLCRKCASQSIAVPIIAEIDLYKYNPWELPGLALYGEKEWYFFSPRDRKYPNGSRPNRSAGSGYWKATGADKPIGLPKPVGIKKALVFYAGKAPKGEKTNWIMHEYRLADVDRSAARKKKNSLRLDDWVLCRIYNKKGAIEKRGPPPTPVVYGDEVVEEKPRLSEMGMPPPPVMPNDFVYFDTSDSVPKLHTTESSCSEQVVSPEFTSEVQSEPKWKDWSGAANDKNSLDFGFNYIDATAFGGVGSNQLFPLQDMFMYNMPKPY

SEQ ID NO: 3569 - protein, 407 aa, Lupinus albus
MGEQQQQQTPTTRGMRSTPTTGVGEIVEVQGGHIVRSTGRKDRHSKVCTAKGPRDRRVRLSAHTAIQFYDVQDRLGYDRPSKAVDWLIKKAKTAIDQLAELPAWNPTATIQQQQQQQQQQQINDILRRESHATEDGLIGGSSSRSANAATTIVVSSGGRISEDFHQQQFGEENNNSNKYNSGGSGFLPPSMDTDIADTIKSFFPMVAAAETTTTSFHNYSTPPDLLSRTTSAAANHHNHQQDLRLSLQSFQDPVLLHHHGEEQEHDHGRFHRMVAWNAAIADAANSGHGGGFVFNSPPPSTVAPAAMFGHHGQYFSQRGPLQSSNTPSIRAWIDPNSFAAAATVAAASHPHYHHHYLSPAIHQASVSGFATPSSGFSGFRIPARIQGEEEHDGVSDKPSSASSDSRH

SEQ ID NO: 3570 - protein, 579 aa, Oryza sativa (japonica cultivar-group)
MAASLLLELAAADDVAAVRRVVEEEKVSLGVAGLWYGPSASGVARLGMERRTAAMVAALYGSTGVLGYVVAAAPAEAARASETDGATPLHMAAAGGAANAVAATRLLLAAGASVDALSASGLRAGDLLPRATAAEKAIRLLLKSPAVSPSSSPKKSASPPSPPPPQEAKKEYPPDLTLPDLKSGLFSTDEFRMYSFKVKPCSRAYSHDWTECPFVHPGENARRRDPRRYSYSCVPCPEFRKGGSCRKGDACEYAHGVFECWLHPAQYRTRLCKDEVGCARRICFFAHKPDELRAVNPSAVSVGMQPTVSSPRSSPPNGLDMAAAAAAMMSPAWPSSPASRLKTALGARELDFDLEMLALDQYQQKLFDKVSGAPSPRASWGAAANGLATASPARAVPDYTDLLGSVDPAMLSQLHALSLKQAGDMPAYSSMADTTQMHMPTSPMVGGANTAFGLDHSMAKAIMSSRASAFAKRSQSFIDRGGRAPAARSLMSPATTGAPSILSDWGSPDGKLDWGVQGDELHKLRKSASFAFRGQSAMPVATHAAAAEPDVSWVNSLVKDGHAAGDIFAQWPEQEQMVA

SEQ ID NO: 3571 - protein, 642 aa, Arabidopsis thaliana
MARDIQLPCDGDGVCMRCKSNPPPEESLTCGTCVTPWHVSCLSSPPKTLASTLQWHCPDCSGEIDPLPVSGGATGFESAGSDLVAAIRAIEADESLSTEEKAKMRQRLLSGKGVEEDDEEEKRKKKGKGKNPNLDVLSALGDNLMCSFCMQLPERPVTKPCGHNACLKCFEKWMGQGKRTCGKCRSIIPEKMAKNPRINSSLVAAIRLAKVSKSAAATTSKVFHFISNQDRPDKAFTTERAKKTGKANAASGKIYVTIPPDHFGPIPAENDPVRNQGLLVGESWEDRLECRQWGAHFPHVAGIAGQSTYGAQSVALSGGYKDDEDHGEWFLYTGRDLSGNKRTNKEQSFDQKFEKSNAALKLSCKLGYPVRVVRSHKEKRSAYAPEEGVRYDGVYRIEKCWRKVGVQGSFKVCRYLFVRCDNEPAPWTSDENGDRPRPIPNIPELNMATDLFERKETPSWDFDEGEGCWKWMKPPPASKKSVNVLAPEERKNLRKAIKAAHSNTMRARLLKEFKCQICQQVLTLPVTTPCAHNFCKACLEAKFAGKTLVRERSTGGRTLRSRKNVLNCPCCPTDISDFLQNPQVNREVAEVIEKLKTQEEDTAELEDEDEGECSGTTPEEDSEQPKKRIKLDTDATVSATIR

SEQ ID NO: 3572 - protein, 205 aa, Glycine max
MSSRAGKGPAIRSYRRRKTALDLDLNRLPAGENREQEGPSTQAVPQEIQLEQQPQVTQPPMIDVEAIDDDVVECTPRAFAEAKNNSRRIRRRTVVDIDLEDQTRRNKRRRELPNLIINCDKYINLEGSSSSMGGSVKKTPEPPKELVFNCPICMGPMVHEMSTRCGHIFCKDCIKAAISAQGKCPTCRKKVVAKDLIRVYLPSTS

SEQ ID NO: 3573 - protein, 232 aa, Brassica oleracea
MYGQSEVESDYALLESIRRHLLGGEAELRFAESIPSSCFTESWGDLPLKENDSEDMLVYGLLNDPYDTSSPSSDLSCITEFVDLETSSKRPSDSPVAKAEPAESFAAATVEKQKAATAKGKHYRGVRQRPWGKFAAEIRDPAKNGARVWLGTFETAEDAAFAYDRAAFRMRGSRALLNFPLRVNSGEPDPVRITSKRSYTSSSSSSSENRKLKRRRKTENVPSEFQVKCEVV

SEQ ID NO: 3574 - protein, 895 aa, Cryptococcus neoformans var. neoformans JEC21
MQSTNAPVNGGVSQQWQSAMQGMYSGAQQRPTSNSKPYNAPDANGMPAKKDDANQSMYSVNTENGYPAYQQQGYGTLGGLGQYGYNSAGLGGLSAAYGGATSSTAGATNGRRTSGQRMMTPPPHPSSVATNTSPSARYYTGQEGEAGRHASPYQPASAPPQILSHQFNAMTNSPQTAQGYPQYQYNQQSHQQNPTQWAGYPTYARQQPTSMYDYTTHALQQWPASDLSKVPSAHQNSWQNAQSLSRLTQAQSPALGQTQPSSASQPTSSTSSTQNASPAVPQSGWQGYPSIPSIPPHTLGGGHLMSGQPYGWGHTQQWGGYYGAQQPSQAPQGTPAHRPPLNNFPTGSTSSAPAESLPTGRKRMSKDKGKTAKEKEENRSHFEDYHGLGKRSAEAVVEEIPGEDKKESKKKKGKEEKEKPVPKAKSHLHPPKQAPSSWQLFFADELAKAKAAEPESRSPGGTSHPQKLNVAQIAKEAGVAYANLSEERKKYYAERVKEHREIYAKELAAWQATLTPEDIRAENAFRAQQRKEGKSRKGNIKDPNAPKKPLSAYFLFLKAIRENSDIRAQVWGTEAETTKQSVMAAEKWRSLTDDEKRPYLEQAEHDKQTYETARKQYEEDSAARARGEDVPIRAVEAPASPPKPPASILRSIHGGQAPVTKSSPSVTDSAPHPAPHSDLEPGITSLGKSPSPNPPSEPSLAQFHTSPRSVPHYDPSLEVDDFQGFSDPLNMDLSGLDGIDVGSMEVGAGGDSEQPWDELQKLIGTEDVYSSAKLQPAAHIVPDASTAARVAPASGFESTDISVAPSYAEAKNETQQETSLNGTPEGNGNESKVRHIAEAAEGELAVLPALGENTAQKNQGGLEVMVGAGEARRHNKNLSTESGQAAADAPVVDGV

SEQ ID NO: 3575 - protein, 209 aa, Marcgravia umbellata
RQVTFCKRRNGLFKKARELSVLCDARVSIIMFSSTGKLHEYISPSISTKQLFDQYQKTVGIDLWSIHYERMQEHLKKLKEVNGGLRREIRQRMGESLDELRYADLLALEHAMDSSLQLIRDRKNKVIGNQIETFKKKLKNVEQIHRNLLQEFDLREDEPHYGLVDNGGEYAPFNGFTTRSPRILAVRLQPNQKSLHSGVGSDLTTYTLL

SEQ ID NO: 3576 - protein, 256 aa, Oryza sativa (japonica cultivar-group)
MSSASSMEALHAAVLKEEQQQHEVEEATVVTSSSATSGEEGGHLPQGWAKRKRSRRQRSEEENLALCLLMLARGGHHRVQAPPPLSASGAPAGSSYQALGGHKTSHRVKLPTPPAAPVLAPAPVAALLPSAEDREPATSSTAASSDGMTNRVHRCSICQKEFPTGQALGGHKRKHYDGGVGAGAGASSTELLATVAAESEVGSSGNGQSATRAFDLNLPAVPEFVWRPCSKGKKMWDEEEEVQSPLAFKKPRLLTA

SEQ ID NO: 3577 - protein, 420 aa, Solanum lycopersicum
AAHAPTIVDQEGVQLKKSIGPKRVTTGNNSNNKEGRWAEHLLNPCAAAITVGNMNRVQHLLYVLHELASFTGDANHRLAAHGLRALTHHLSSPGSSSASSGTIGVTNFSSANHKFFRDSLINFIDVSPWFRIPNNIANSSVLQIIGQQDRLKNLHILDIGVSHGFQWPTLLEELTRRSGGPPPLVRLTVITPTTENGELTGTPFVIGPPGYDFSSQLLAYAKAININLQINRLDNFPLQNLNSQIINSSSDETLVICAQFRLHNLNHTIPDDRTDLLKILKSLDPKGLVLSENNTECSCNSCGDFATTFSRRVEYLWRFLDSTSVAYKGRESEERRMMEGEAAKALTNMGEMNERKEKWCERMRSAGFVKAVFGEDAIDGARALLRKYDSNWEIRVEEKDGCVDLWWKGQPISFCSLWKI

SEQ ID NO: 3578 - protein, 495 aa, Oryza sativa (indica cultivar-group)
MTTRRTRKERKQMGGGGKCKRGKRGKIAAKRRRGQVRCCSSSSGGARRRTRERESEESLGEMGECRGGGDGLIKLFGKTIPVQPDAKDVQQHSGSSSSSTESDVQETAAVAVADPSPRSEVVDGESPPQPGGEAASHQQQQKEMKLKKPDKILPCPRCSSMDTKFCYFNNYNVNQPRHFCKHCQRYWTAGGAMRNVPVGAGRRKNKNATAAAHFLHRVRACAAAAAMPAAPHDATNATVLSFGGGGGGHDALPVTLDLADKMTRLGKEGLVAHARNADAAAACSEVSSNRDDEQIGNTVAKPANGLQQHPPPPHHHHHSAMNGGGIWPYYTSGIAIPIYPAAPAYWGCMIPPPGAWSLPWPATVQSQAISSSSPPTSATPSVSSFTLGKHPREGGDHEARDHHGNGKVWVPKTIRIDNADEVARSSIRSLFAFRGGDKVDDNNDDDGTSVHKLATTVFEPKRDGKTAKHPAITSLPLLHTNPVALTRSATFQEGS

SEQ ID NO: 3579 - protein, 285 aa, Arabidopsis thaliana
MPTLYKKAGFMIKLLFTYICTYTYKLYALYHMDYACVCMYKYKGIVTLQVCLFYIKLRVFLSNFTFSSSILALKNPNNSLIKIMAILPENSSNLDLTISVPGFSSSPLSDEGSGGGRDQLRLDMNRLPSSEDGDDEEFSHDDGSAPPRKKLRLTREQSRLLEDSFRQNHTLNPKQKEVLAKHLMLRPRQIEVWFQNRRARSKLKQTEMECEYLKRWFGSLTEENHRLHREVEELRAMKVGPTTVNSASSLTMCPRCERVTPAASPSRAVVPVPAKKTFPPQERDR

SEQ ID NO: 3580 - protein, 463 aa, Yarrowia lipolytica CLIB122
MLTKSRFHCDVCSCDCTNLVRIRCAECQDYDLCVQCFSQGASSGVHKPYHNYMIIEQHAYPIFTEDWGADEELLLIEGAEMQGLGNWQDIADHIGGRSKEEVGEHYKEVYLDSPDYPLPPMKRKFEITAAEFAANKKERLDKRRNMPTALPVPKQKPTASVPACHEVQGFMPGRLEFETEHENEAEMTVKDMVFDQDDTEADVELKITVLDIYNSRLTSRTERKRAIINHGLLQYRKNASVDKKRTKEERELVNKLKPFARIMTLQDFTDFVDGMIIELQCRRRLAELQEYRRNGITTFEAASKYERDKTVRANALARLQAPINSINSTGSRYTANSMNAANNALVQKTNKQAAAANQAAAEAVKMDPDSGADTLRLFRKPVANPLDISHAPDVELLSPEEQVLCSQLRILPKPYLAIKETLFRELLRTGGVLKKRTARELVKIDVNKTARIYEFFQSQRWLS

SEQ ID NO: 3581 - protein, 312 aa, Glycine max
IYPPTRTHLGCSAWRRVSPPPPPPPIKEAILLRGTASGSSDPPVQLDLLPFSPVLRPQQHPPSHLRIPWLTQACGGAARVLDVNLFRAATAEDGDDGTSLSSSPNSAVSPFQMDFCTRNCNAEFGGRNKREQQEAEGRASDDDENGSTRKKLRLSKEQSAFLEESFKEHTTLNPKQKLALAKQLNLRPRQVEVWFQNRRARTKLKQTEVDCEYLKRCCETLTEENRRLQKELQELRALKTSQPFYMQLPATTLTMCPSCERVATNSTTTNQTSIVNNNASSQIPVELSLSKPRILPFPNGQVQAQAHQIASS

SEQ ID NO: 3582 - protein, 113 aa, Brassica napus
WKKIAEFFPDRTEVRCLHRWQKVLNPDLIKGPWTQQEDEKIIELVEKYGPAKWSIISDSLPGRIGKQCRERWHNHLNPGINKDAWTPEEELALMNAHRVHGNKWAEIAKVLPG

SEQ ID NO: 3583 - protein, 765 aa, Zea mays
MEAKPSSAAHGDAPAVEAPRRRGSGGKRKSAGSSFTPSKRQAKERNAAFHVPQHLLHSGPLTRAARHSPHKLAGTPPESGPASSSAATGDGVSGGQAEVDAIRPETEETPAPELPLVDEMLEAVRSRGPGVHVVPTFAGWFSWKEIHSVEKQILPSFFNGKSVKRTPEVYLAIRNSIMMKFHANPQLQLESKDLAELSIGESDARQEVLEFLDHWGLINFHPFPPAGHEESKPEESQDNSNDEKASLIEQLFKFESVQSYMTPLLNKEDVGAPPPLPSLFPEPVLIENMVAAAEPSVEYHCNSCSVDCSRKRYHCRTQADFDLCCVCYNEGKFDPGMAKTDFILMDSAEVSGASGTSWTDEETLLLLEGLEIFGGKWAEIAEHVATKTKAQCMLHFLQMQIEDRFHDGDDINQNIPVSTEQATTEKAIVETPEKMEVGDKVEGRDNADEKASEKTEGSCEETKTEDANVVNKDTQKSGGKDSGASPSTEEAKQSSDDQPIVKENSVDVDTSGEKLSNVAIDILKCAFEAAGHSPEYEGSFADAGNPVMALAAYLAGLVEDGNATTSFRSSLKSISEVPPALQLASRHCFILEDPPNELKDICVCVRDIFSNSIANEKKEINEKEDKSLSVEKTNNSSMSQNDHQESNIKSVSRDDCSSVEPKGNNAKESSDSTGIGDMSAIGTTKGNSKQVNDSPSVEVEAPDDSSLKSKDELNDTEDAVATPATVQEQKHSQTLENGDKAGWRLILAAETGDANRSQAMVSGLG

SEQ ID NO: 3584 - protein, 220 aa, Triticum aestivum
  misc_feature (176)..(176): Xaa can be any naturally occurring amino acid
  misc_feature (182)..(182): Xaa can be any naturally occurring amino acid
  misc_feature (210)..(210): Xaa can be any naturally occurring amino acid
MSPDDVSRKSPVPPPSPPPMDSWARGGRRSRPRGGGGSGSASSGGAAESEEEYLALSLLMLSRGVRGEVEDGGFGGVKGVGAAPTKAQGYECSVCGKVYASYQALGGHKTSHRKPPTPPAASAGGDEASGGAPVEAKVHQCSLCHRTFPSGQALGGHKRLHYEGGAAGDGTGKDKXGRQAKXAALLRDFDLNLPASGVAGDEAESPPPEXKRARLMLLTV

SEQ ID NO: 3585 - protein, 233 aa, Solanum sogarandinum
MKIQCDVCEKAQATVICCADEAALCAKCDIEVHAANKLASKHQRLHLQCLSNKLPPCDICQDKAAFIFCVEDRALFCKDCDEAIHSASSLAKNHQRFLATGIRVALSSSCNKEAVKNQLEPQPPQQNSQQVGLKMPPQQLSGITSPSWPVDDLLGFPDYESSDKKDLLELGEFEWLGGIDLFGEQTAAEVPELSVPQSSNTNIYKTTKYQMPYKKPRIEISDEDEYFTVPDLG

SEQ ID NO: 3586 - protein, 256 aa, Arabidopsis thaliana
MEGITHPIPRTVEEVFSDFRGRRAGLIKALTNDMVKFYQTCDPEKENLCLYGLPNETWEVNLPVEEVPPELPEPALGINFARDGMQEKDWVSLVAVHSDSWLLSVAFYFGARFGFGKNERKRLFQMINELPTIFEVVSGNAKQSKDLSVNNNNSKSKPSGVKSRQSESLSKVAKMSSPPPKEEEEEEDESEDESEDDEQGAVCGACGDNYGTDEFWICCDACEKWFHGKCVKITPAKAEHIKHYKCPTCSNKRARP

SEQ ID NO: 3587 - protein, 1353 aa, Oryza sativa (indica cultivar-group)
MEAAALLSPTATSRSPLPLLSTAPAAHRLHVLLPLSGRRRRLCLRSSPRPRGSLGCAGDCVVRSMGSSRERGVLVKTSSSSASVESATQEVGAASSGEWSGDAIRRRFLDFYAARGHKILPSSSLVPDDPTVFLTIAGMLQFKPIFLGKEPRRVPCATTSQKCIRTNDIENVGRTSRHQTFFEMLGNFSFGDYFKKEAITWAWELTTKEFGLPPERLWISVFQDDDEAFSIWHNEVGVPKERIKRLGEDDNFWTSGATGPCGPCSEIYYDFYPERGSSDADLGDDSRFIEFYNLVFMQYNKKDDGSLEPLKQKNIDTGMGLERMARILQKVPNNYETDLIFPIIEKAASMALVSYTTADDAMKTNLKIIGDHMRAVVYLISDGVIPSNIGRGYVVRRLIRRVVRTGRLIGIRGDGHGNSEGAFLPSLAEVAISLSTEIDPDVESRRKSILGELQREELRFVQTLERGEKLLDELLDEALSSAGNNGGKPCLSGKDVFLLYDTYGFPVEITAEIAGERGVIVDMKGFDMEMENQRKQSQAAHNVVKLSVGNETEIVKSIPDTEFLGYDSLSATAVVKGLLVNGNSVNVVSEGSDVEIFLDRTPFYAESGGQVGDNGFLYVYGEEDAKQKAVIEINDVQKSLGNIFVHKGTIKQGSVEVGKEIDAAVDAKLRQGAKAHHTATHLLQSALKSIIGSETSQAGSLVAFDRLRFDFNFHRPLSEEELMKIESLVNQWVSSATHLETKVMDLQDAKNAGAIAMFGEKYGEQVRVVEVPGVSMELCGGTHVSNTAEIRGFKIISEQGIASGVRRIEAVAGDAFVEYVCARDNYMRCLCSSLKVKAEDVNGRVETILEELRTTRNEVSSLRSKIAVLKAASLANKATTIDNTRVVVENMGDVDADGLKSAAEYLVDTLEDPAAVILGSSPGDGKVSLVAAFSPGVVKMGIQAGKFVGGIAKLCGGGGGGKPNFAQAGGRKPENLPASRNRYSFLEVDLAGPPWCVWFASFVALYDREDVESVGLDDAARRLGVERRRIYDIVNVLESIGMLVRRAKNRYTWIGFGGVPAALAKLKEMSLRAVSSVASPSLDETSAANVSDDEDDDKLDDAEGDAESEKLSLSQSIDNPSDKPDAPPCKLRSEHRKEKSLGLLTQNFVKLFLTMEIETISLDEAAKRLLGEGHAANNMRTKVRRLYDIANVLSSLNLIEKTQQADSRKPAFRWLGQAKRNEGVTVALPPTKTLPNKRAFGTDLTNIDNKRGKLDSTMENRGKPTQDGGNLFNNLQRQLGQENRSDFVYGPFHPAVARKQEHGNRTVQEKERKSIQDWENLASSFRPQYQNPVLHKRQEANETWKLLSARGLL

SEQ ID NO: 3588 - protein, 408 aa, Oryza sativa
  misc_feature (114)..(114): Xaa can be any naturally occurring amino acid
  misc_feature (128)..(128): Xaa can be any naturally occurring amino acid
DLGEWQPATSSHLHRAHESIPFHSPSPPTHVASSSTILPPPPPPPLLAHHHWRRSSGSCRGGARTHEATVQRVRGGGGQRPLLRRRGRPVRALRPRHPRRQPPRREAPPPPSPXPPPPPPPPPPPPSXPPPPSPPKCDICQESHAYFFCLEDRALLCRSCDVAVHTANAFVSAHRRFLLTGVQVGQEQDEHSPDPPEPSPPPPPPPPASKSDHPAPLYGEGGGGFSWDAADSPAAGGLPDWSAVVDQFGSPPPPRHTDTATVTTPPPTKRSPRAPAFGGQGGMMDWPLGEFFGGFTDFTGGFGFGFGDSGTSKADSGKLGGSTDGSPYYRSSSEDDRNADELFGQVPEIQWSVPELPSPPTASGLHWQRHPAATHGGGGGGPDTTAFVPDICSPDSCFPATTSKRRRQ

SEQ ID NO: 3589 - protein, 226 aa, Zea mays
VCGICFDAFPAGGTRSAGCAAHYYCDGCWCGYVAAAVGDGARCLALRCPDPSCAAAVVRELVDEVARDDDRARYARFWLRSYVEESGGRIRWCGGAGCTRSVELLGGCDAEAVASAVDVVCGCRHAFCWRCGEEAHRPVSCGTVRAWLAKNASDSETANWVVANTKRCPMCRRPIEKNHGCNHMTCGAPCHHQFCWLCLDPWDHHRGCTRYDSRRRRRHGPVDEVE

SEQ ID NO: 3590 - protein, 397 aa, Oryza sativa
MELYPGYLEDHFNIHKLSISSASPPEYMTSASTQFAAPVRMGAYDRPPPVGMWSHEQFKVDNGQATSASTIMEAEMKFENRLEEIPQVVLEEGRNVDQEASKPPDKVLRRLAQNREAARKSRLRKKAYIQQLETSRLKLAQLEQELQRARQQAVYANGSLREPNLGFTGPIDPGALGFEIKYSHWVDEQNRNTGELRNALLQGQTTDQDLELKLLVEAGLDNYNRLFEMKEEAANSDVFYIMSGMWKTPTERFFLWIGGFRPSEVLKNLRPQLEPLTDKQVVEVGGLQQTSMQVEDALSQGMDKLKQTIADSLTAADPFDSPEAYMVHMANAVEQLRSLVQFVTQADHLRQQTLQEMHRILTTRQAARGLLALGDYFQRFRALSSLWAARPRDSGIS

SEQ ID NO: 3591 - protein, 571 aa, Malus x domestica
MAGAKLEECCLENKQSMATSSSSVSEGSGSAIIKSPGACSPASASPTQRRTSGPIRRAKGGWTPQEDETLRNAVAAFKGKSWKKIAEFFPDRSEVQCLHRWQKVLNPELVKGPWTQEEDDKIIELVAKYGPTKWSLIAKSLPGRIGKQCRERWHNHLNPDIKKEAWTLEEELALMKAHQMHGNKWAEIAKVLPGRTDNAIKNHWNSSLKKKLDFYLATGKLPPPPKYGAKEPRSNATKKILVRSTKGSDSTAQTSSGNADMSKLDEDGKDQFESAAPPQDMGASSSVHPNECADSEGVECDLRLSFMDLSCSNSDSGPKFDNFGVKRKPQIENSVSNGRAESENCGFSNQMDEDSVKTTSFPFETPRYGSLYYEPPPLESSVQFNSGFSSMHRLQNDYTSSPNLSPISFFTPPCVKGSGLCNQIPESILKIAAKTFPNTPSILRKRKTIGQGKSPCHKVAVVDCESVREMLNVSSEHKNSAEVSGSQDGSLCESPTSNGISTIGPNGKAFNASPPYRLRARRTAVFKSVEKQLEFTCDEEYDANSMSVELSANGGSVVIKDCTHPTKMAVT

SEQ ID NO: 3592 - protein, 362 aa, Zea mays
SQWPPMAWPLPSTRPTSSSKCSKPCLTTTSSRSSTMKATTTRTTRRRTISWLPLPRPSSALSSTTSAAPWRPRRRRQCWPGGFGGKRMYPDVGGMAGDDSHHLHAEPQQQQEQQASDDEEEGSAAVGGGERKRRLSVDQVRTLERSFEVANKLEPERKAQLARALGLQPRQVAIWFQNRRARWKTKQLEKDYDALRRQLDAARAENDALLSHNKKLQAEIMALKGGGGGGGRQEAASELINLNVRETEASCSENNSSEINGLDVSRPDPAAGESPAMNSYRGGLPFYASAAARADIHHQLLHSGGQPSPAAAAPPKMELAPGSPPATAGGGGGTFGSLLCGAAVDEQPPFWSWADGHHTCFQ

SEQ ID NO: 3593 - protein, 312 aa, Malus x domestica
MAVSRKDMDRIKGPWSPEEDDSLQRLVQKHGPRNWSLISKSIPGRSGKSCRLRWCNQLSPQVEHRAFTPEEDDMIIRAHARFGNKWATIARLLNGRTDNAIKNHWNSTLKRKCSDGGGVDLNGGYDGHFLRDHEQPPLKRSVSAGSGVPVSTGLYMSPGSPSGSDASDSSAQVMSLSDCHVYRPLARTGGVLPPAETTSSSNNNSSNSEKNDPPTSLSLSLPGVDSEEVSNQVAPVTESTQAPAPAPVSTTSVAVQNIPVELLAVMQGMIRKEVRNYMAGLEQSGVCFQQAAAGNEGFWNVGVKRIGFSRIE

SEQ ID NO: 3594 - protein, 150 aa, Brassica napus
  misc_feature (129)..(129): Xaa can be any naturally occurring amino acid
MKIQCNVCEAAEAAVLCCADEAALCWSCDEKVHAANKLAGKHQRVPLSVSSSSIPKCDICQEASGFFFCLQDRALLCRKCDVAIHTVNPHVSAHQRFLLTGIRVGLECTDTGPSTKSSSPASNDDKAMXTKQFTLPTSEPQKMDFDHHQV

SEQ ID NO: 3595 - protein, 610 aa, Medicago truncatula
MAKPSAADNRTRSSVQIFIVVGLCCFFYILGAWQRSGFGKGDSIALEITKNNAECDVVPNLSFDSHHAGEVSQIDESNSNTKVFKPCEARYTDYTPCQDQRRAMTFPRENMNYRERHCPPEEEKLHCMIPAPKGYVTPFPWPKSRDYVPYANAPYKSLTVEKAIQNWIQYEGNVFRFPGGGTQFPQGADKYIDQLASVIPINDGTVRTALDTGCGVASWGAYLWSRNVVAMSFAPRDSHEAQVQFALERGVPAVIGVFGTIKLPYPSRAFDMAHCSRCLIPWGANDGMYMMEVDRVLRPGGYWVLSGPPINWKVNYKPWQRPKEELEEEQRKIEEVAKKLCWEKKSEKAEIAIWQKMTDTESCRSRQDDSSVEFCESSDPDDVWYKKLKACVTPTPKVSGGDLKPFPDRLYAIPPRVSSGSIPGVSSETYQNDNKMWKKHVNAYKKINSLLDSGRYRNIMDMNAGLGSFAAAIHSSKSWVMNVVPTIAEKSTLGVIYERGLIGIYHDWCEGFSTYPRTYDLIHANGLFSLYQDKCNTEDILLEMDRILRPEGAVIIRDEVDVLIKVKKLIGGMRWNMKLVDHEDGPLVPEKVLIAVKQYWVTDGNSTSTQ

SEQ ID NO: 3596 - protein, 152 aa, Brassica napus
  misc_feature (55)..(55): Xaa can be any naturally occurring amino acid
  misc_feature (128)..(128): Xaa can be any naturally occurring amino acid
  misc_feature (146)..(147): Xaa can be any naturally occurring amino acid
  misc_feature (151)..(151): Xaa can be any naturally occurring amino acid
MSGEGSKDHQDEDEATLPGFRFHPTDEELLGYYLRRKVENKPIKLELIKQVDIYXKFDPWDLPRVSSVGEKEWYFFCMRGRKYRNSVRPNRVTGSGFWKATGIDKPVYSSLDCVGLKKSLVYYLGSAXGKGTKTDWMMHEFRLPSXXKPNXP

SEQ ID NO: 3597 - protein, 237 aa, Oryza sativa (indica cultivar-group)
MDSVVDGGLDTRLSLAVGCCPPRRRPVLLFGEVLPSPEKKVAAAAVVAAGKRGREQRGEAEAEATTTRQRRSCKKGRRGRGDDDDDDGDRRSPSGGGGDEEGASRKKLRLTGEQATLLEDSFRAHNILSHAEKQELAGKLGLSARQVEVWFQNRRARTKLKQTEADCDLLRRWCDHLAADNARLRRDLAELRRSSSSPPVSGLAVATPVVCPSCAHDDKRRLAFATAAAAAGDMASN

SEQ ID NO: 3598 - protein, 259 aa, Oryza sativa (japonica cultivar-group)
MMFSLCSTSGCPFGSSCHFLHNFPGGYQAAAKMTSHGGTAVAAPPGRMPLGPGAPNGPPTSSVKTRMCNKYNTAEGCKWGSKCHFAHGERELGKPMLLDNSMPHPMGSMPFEAPPMPGPDIVPPSTFGASATAKISVDASLAGGIIGKGGTNTKHISRMTGAKLAIRDNESNPNLKNIELEGTFDQIKHASAMVTELIVRISGNAPPAKNPGRGSHAGGPGSNFKTKLCENFNKGSCTFGDRCHFAHGESELRKPPAAA

SEQ ID NO: 3599 - protein, 401 aa, Arabidopsis thaliana
MKRKKMKFCRRWRLTWIKNPAHAKKSRNSRKALKQKNEIVESSPVSDKGKETKSFEKDLMEMQAMLEKMKIEKEKTEDLLKEKDEILRKKEVEQEKLKTELKKLQKMKEFKPNMTFAFSQSLAQTEEEKKGKKKKKDCAETKRPSTPYILWCKDNWNEVKKQNPEADFKETSNILGAKWKGISAEEKKPYEEKYQADKEAYLQVITKEKREREAMKLLDDEQKQKTAMELLDQYLHFVQEAEHDNKKKAKKIKDPLKPKQPISAYLIYANERRAALKGENKSVIEVAKMAGEEWKNLSEEKKAPYDQKTKETAKNKKKNENVDPNKPKKPTSSYFLFCKDARKSVLEEHPGINNSTVTAHISLKWMELGEEEKQVYNSKAAELMEAYKKEVEEYNKTKTSS

SEQ ID NO: 3600 - protein, 236 aa, Zea mays
  misc_feature (95)..(95): Xaa can be any naturally occurring amino acid
  misc_feature (103)..(103): Xaa can be any naturally occurring amino acid
  misc_feature (111)..(111): Xaa can be any naturally occurring amino acid
MMDCAGGRDPVEDFLLGGAGAGDDGDLVAVFCDDGGLGIEGIHGDACGFEQSNLGKRGRDEPCSSGPTSKACREKMRRDKLNDRFLELSSIMNPXREAKLDKXNILSDAAXRWWHNFKGEAEKLKESNEKLRENFGGLEEEKNELREEKVRLKVEKDRLEQQVKAMSVAPTGYVPHLPHPASYHPAAFTPFAPPQQAPANKSAPIPAPFPGMAMWQWLPPTIVDPTQDPKLWPPNA

SEQ ID NO: 3601 - protein, 123 aa, Triticum aestivum
  misc_feature (15)..(15): Xaa can be any naturally occurring amino acid
  misc_feature (23)..(23): Xaa can be any naturally occurring amino acid
  misc_feature (27)..(27): Xaa can be any naturally occurring amino acid
  misc_feature (29)..(29): Xaa can be any naturally occurring amino acid
  misc_feature (36)..(36): Xaa can be any naturally occurring amino acid
  misc_feature (39)..(39): Xaa can be any naturally occurring amino acid
  misc_feature (46)..(46): Xaa can be any naturally occurring amino acid
  misc_feature (55)..(55): Xaa can be any naturally occurring amino acid
  misc_feature (68)..(70): Xaa can be any naturally occurring amino acid
  misc_feature (75)..(77): Xaa can be any naturally occurring amino acid
  misc_feature (81)..(81): Xaa can be any naturally occurring amino acid
  misc_feature (84)..(84): Xaa can be any naturally occurring amino acid
  misc_feature (87)..(87): Xaa can be any naturally occurring amino acid
  misc_feature (89)..(89): Xaa can be any naturally occurring amino acid
  misc_feature (93)..(93): Xaa can be any naturally occurring amino acid
  misc_feature (95)..(95): Xaa can be any naturally occurring amino acid
ILPLSRARFPSEKPXPPPPTTVXQAQXGXKCPHRKXKKXRLNCKQXRRGKFLVKXDDAVYDEIVMLVXXXKDPRXXXRFPXTRXFPXMXQFYXLXMRLPAEGILPYNFSLTHSPPAVLFSASP

SEQ ID NO: 3602 - protein, 192 aa, Chara globularis
MGRAKIEIKRIDNATSRQVTFSKRRNGLLKKAYELSVLCDADIAVIMFSPTGKLFEYANSSMKEILDRYHSCPPEQREKRKFDNTDYLSKEAKRLRHEVELAKQENRHLSGEDLNAVQMPELDGLELKLEDALRKIRFRKREVMQMEIDRLQQKVWTSSPQFLLAWRSCHPAVVQIIIFCSHPAFVPKFILQ

SEQ ID NO: 3603 - protein, 336 aa, Coleochaete scutata
MGRGKIEIRRIENATSRQVTFSKRRNGLLKKAYELSVLCDVDIAVIVFSPTGKLFQYASSSMKEILERYEQVPPEQKEKGSQRLDNMDYLNREVAKLRNEVEHKYHEARQLEGEDLDRLGVYELEQLEQKLSNSMRRIRGRKDELMKAELEGLRKQVADMETALVGAASFDGRPLSGSSNYLLQSIPGIRTMPPSSLGGMNPASTSLQLGSDRLFGNRGVELHDRSASDESPVMTNRMSVDFAQAPREMSGVDLSGSPVPPWKSQAAAAAQQEWKNQASSPTDWKVTNTEHLDSWPKAPAPTPEWKSTSVQPEWKNQSSPSSEWKPLDWMYHGPQD

SEQ ID NO: 3604 - protein, 153 aa, Narcissus pseudonarcissus
MCGGAIISDFIPPSRSRKLTADYLWPNLNKGKDKKKSFGFEDDFEADFNEFEDESEEGESEAVDVKPFKFGAKAGFSREGSTYLKPIELNGAAERSSKRKRKNQYRGIRQRPWGKWAAEIRDPNKGVRVWLGTFNTAEEAARAYDDEARRIRG

SEQ ID NO: 3605 - protein, 84 aa, Glycine max
FYHVISRASSVFDESFFCLQYHATSGVSKCTLCLSNPQHPTATSCGHVFCWNCITEWCNEKPECPLCRTPITHSSLVCVYHSDF

SEQ ID NO: 3606 - protein, 319 aa, Zea mays
  misc_feature (104)..(104): Xaa can be any naturally occurring amino acid
  misc_feature (117)..(117): Xaa can be any naturally occurring amino acid
MTRRCSHCSHNGHNSRTCPNRGVKIFGVHLTDGSAIRKSASMGNLSLLSAGSTSGGASPADGPDLADGGGGYASDDFVQGSSSASRERKKAASVFLGLKKNTGXVFAGITKARERGXWRGISRNFVVSRTPTQVASHAQKYFIRQSNMSRRKRRSSLFDMVPDESMDLPPLPGSQEPEISQLNQPPLPPPVEEEVESMESDTSAVAESSGASALMPESLQPTYPMIVPAYFSPFLQFSVPFWPNQEDGGDLPQETHEIVKPVAVHSQNPINVDELVGMSKLSIWEHGQETVSTSLSLNLLGGQNRQSAFHANPQTRAQA

SEQ ID NO: 3607 - protein, 351 aa, Malus x domestica
MGRTPCCDNKKDLKKGPWSPEEDELLLNYISKNHGHGSWRSLPKLAGLQRCGKSCRLRWTNYLKPDIKRGPFSKDEEKLIIQLHGMLGNRWATIASQLPGRTDNEIKNLWNTHLRKGLVSMGIDPQTHEPLSSNCLSNNASASAATRHMAQWESARLEAEARLSRDSSLFSRVPEKSESDHFLRLWNSEVGKSFRKLSTSDKFACQSPISQASSSTKCGSLSAVTTEVGNLTGSSTMAGNHNEDLIYRPFLINTEDVEYKPFQFNTEEVGYKPFQSITEEVEFKICQSNTEDVMAGSVSSCSNDLEDSSDTALQLLLDYPTNDDMSFLENNANDYATTPAELTPNSFICPL

SEQ ID NO: 3608 - protein, 251 aa, Malus x domestica
MGRQPCCDKLGVKKGPWTAEEDKKLVNFLLTHGQCCWRAVPKLAGLRRCGKSCRLRWINYLRPDLKRGLLNDAEEQLVIDLHARLGNRWSKIAARLPGRTDNEIKNHWNTHIKKKLVKMGIDPITHEPLHKQVTTPQEMPCEASNQPANSDMSIQQMNTNIPEHGISTNSDGNSTSENSPSNDSEPAEPNPNYSEEEDPLVSFILSDTFLEDLTWDFSTSSEYSSADNPTEENSLAWFMDCNDFGVEDFEL

SEQ ID NO: 3609 - protein, 131 aa, Arabidopsis thaliana
EDTDPQGSRGISDDEDGDNSRKKLRLSKDQSAILEETFKDHSTLNPKQKQALAKQLGLRARQVEVWFQNRRARTKLKQTEVDCEFLRRCCENLTEENRRLQKEVTELRALKLSPQFYMHMSPPTTLTMCPS

SEQ ID NO: 3610 - protein, 234 aa, Hyacinthus orientalis
MGRGKIEIKRIENTTNRQVTFCKRRNGLLKKAYELSVLCDAEVALIVFSTRGRLYEYSNNSIKSTIERDKKACADSSSSSAVIEVNTQRYYQQEASKLRQQIQILQNANRHLMGESLDPLNVKELKQLETRLERGITRVRSKKHELLFAELEYMQKREVELQTDNMYLRAKIGENERAHQASVVQAGTEFDALPTFDSRNYYQVHMLQAASHYSHHQDQTALHLGYETKADPSA

SEQ ID NO: 3611 - protein, 343 aa, Malus x domestica
MRKPEPSSAAAGKNNKENNSNSKLRKGLWSPEEDDKLMRYMINNGQGCWSDVARNAGLQRCGKSCRLRWINYLRPDLKRGAFLPQEEELIIHLHSLLGNRWSQIAARLPGRTDNEIKNFWNSTIKKRLKNLSSSNGSPNTSDSSPEAKDHRVVAASRFIIPGQEHGMVPIYMDSTSSFMQSAVLSHMFDPFPALDIDQGGLTLPGAGGYYNANPCITQREIGVGGGDDCYNFGGNGGFGSGDVDIGVEGEIFVPPLESVSIEDQNIKTETTYGDSKNNNIYYNNINSILTCNKTNKNIKGESIIGVGNYFDDDQEELTMGDWDLEDLMKDVSSSSFPFLDYQS

SEQ ID NO: 3612 - protein, 556 aa, Zea mays
MSDQKDPGIKLFGRVIPWGPETAPGTTEVEDPPQDELQPRAPEVAAAVDEDEHNEKEEKNANEVVVMPQEKGKETKVDTPQEEKGNEMEVDAPQKEHDDEMKIDAQREEKDEQTDANASPTHGNIEPANLPPSGLMDSAEDKAASDAKGENEKTSNEESGQDKALNKKPDKILPCPRCNSMDTKFCYYNNYNVNQPRHFCKNCQRYWTAGGTMRNVPVGAGRRKSKNASLHYRQLLMAPDCMLGPRVDISKPVLPEALASSPPAPTQPASRNGTVLKFGPEVPFCESMVSALNIDEQNVNSPGGPTARGENREDNNNPGSGTPPYNGVPETMAPVVGKNGAPVHCNGVAPVPQYYLGTPFMYPWSVGWSNVPVMVPGKSMPEPAPAPESCSTSSAVWMNPPMMPGSRPPSPAFPYPLVPPGLWGCFSGWPPTAWNVPWTRTNVSVSPPPSPSSNSSSCSGNGSPTLGKHSRDTNPLREEKREKSLWVPKTLRIDDPDDAAKSSIWATLGIKPGDPGTFIKPFQSKVESKGQRSDAAQVLQANPAALSRLQSFQESS

SEQ ID NO: 3613 - protein, 247 aa, Oryza sativa (japonica cultivar-group)
MGRGKIEIKRIENTTNRQVTFCKRRNGLLKKAYELSVLCDAEVALIVFSSRGRLYEYANNSVKSTVERYKKANSDTSNSGTVAEVNAQHYQQESSKLRQQISSLQNANSRTIVGDSINTMSLRDLKQVENRLEKGIAKIRARKNELLYAEVEYMQKREVELQNDNMYLRSKVVENERGQQPLNMMGAASTSEYDHMVNNPYDSRNFLQVNIMQQPQHYAHQLQPTTLQLGSRPSISFGVDTVRTHVR

SEQ ID NO: 3614 - protein, 261 aa, Oryza sativa
  misc_feature (222)..(222): Xaa can be any naturally occurring amino acid
  misc_feature (243)..(243): Xaa can be any naturally occurring amino acid
FGSSYLYESSSLHGFFIPISSRHYTYNRKQKSLGLLCTNFLSLYNRDTVHLIGLDDAATRLGVERRRIYDIVNVLESIGVLSRKAKNQYTWRGFAAIPLTLQDLKEEGLKENSNSLRGPGNHDKVSDDEDDEETQSNPAATGSQSDKLNPNSTLPKPLKNENRREKSLALLTQNFVKLFVCSNVELISLDEAAKLLLGDAHNTSVMRTKVRRLYDIANVLSXMNLIEKTHTMDTRKPAFRWLXSEGKTWDETLHISNLNDS

SEQ ID NO: 3615 - protein, 245 aa, Solanum lycopersicum
MATNSSSHSPRTVEEIFKDFSARHAAVLRALTTDVEDFYSQCDPERDNLCLYGHPNESWEVAVPAEEVPPELPEPVLGINFARDGMERRDWLSLVAMHTDSWLLSVAFYFGARLNRNERSRVFTLINDLPTVFEAVTGRKPLKDKPSVDSGKKSKNNAKREKQMKANQRLQEESDDEDEGNEDEHEETLCGSCGTNGNEDEFWIGCDMCEKWYHGKCVKITPAKAQSIKEYRCPSCSNKRAKHMA

SEQ ID NO: 3616 - protein, 502 aa, Oryza sativa (japonica cultivar-group)
MAQEDVGHLSDAGLALGLSLGGGGGGTTDAAAAHRGGCRRPSPSSQCPPLEPSLTLSLPDDAAAGAAATATATASGGGGPAHSVSSLSVGAAAAAAVKRERAEEADGERVSSTAAGRDDDDDGSTRKKLRLTKEQSALLEDRFREHSTLNPKQKVALAKQLNLRPRQVEVWFQNRRARDERETASPGTHEKRIEVAATGAAAAGGLSVVNMAQEDVGHLSDAGLALGLSLGGGGGGTTDAAAAHRGGCRRPSPSSQCPPLEPSLTLSLPDDAAAGAAATATATASGGGGPAHSVSSLSVAAAAAAAVKSERAEDADGERVSSTAARRDDDDERSTRKKLRLTKEQSALLEDRFPDHSKLNPKQKVALAKQLNLRPRQVEVWFQNRRARTKLKQTEVDCEFLKRCCETLTEENRRLQRELQELRALKFAPPPPSSAAHQPSPAPPAPFYMQLPAATLTICPSCERVGGPASAAKVVAADGTKAGPGRTTTHHFFNPFTHSAAC

SEQ ID NO: 3617 - protein, 122 aa, Brassica napus
MRRGRVSTPVTANHNPSIKETRFRGVRKRPWGRYAAEIRDPYKKSRVWLGTFDSAVDAARAYDAAARNLRGPKAKTNFPIESPPSPPQIDPFMDHRLYAGASSRPTSSSMSSTVESSSGQRS

SEQ ID NO: 3618 - protein, 280 aa, Glycine max
MEGSTTSSELPPGFRFHPTDEELIVYYLCNQATSKPCPASIIPEVDLYKFDPWELPDKTEFGENEWYFFSPRDRKYPNGVRPNRATVSGYWKATGTDKAIYSGSKHVGVKKSLVFYKGRPPKGAKTDWIMHEYRLAESKIPSSRKIGSMRLDDWVLCRIYKKKSMVKALEHKEAQPKVQIANLAAANQDVEQKMMNLPRTWSLAYLLDMNYLGPILSDGSYCPTLDFQINNANIEFDPFVKSQPVEMNYNYEADSGKYQVKQSSTIDQPIYVKQMYDLLG

SEQ ID NO: 3619 - protein, 310 aa, Hevea brasiliensis
MDRGIEILSPASYLQNSNWLFPETRATKWTPEENKQFENALALYDKDEPDRWQRVAAVIPGKTVGDVIKQYRELEEDVSDIEAGLIPIPGYSSSDAFTLEWFNNNQGYDGFRHYYTPGGKRTTAARSSEQERKKGVPWTEEEHRQFLMGLQKYGKGDWRNISRNFVTTRTPTQVASHAQKYFIRQSTGGKDKRRSSIHDITTVNLPDTKSPSPDEKKSSPDHSTTSLQSQPQQKMVGMAKGLIDWKPQNEGGGAAGVFSQANGNLLMAPLCGISSYGQKLQEQNLLRGTLPGYQFAPYNLIFQMQPMQRQ

SEQ ID NO: 3620 - protein, 546 aa, Magnaporthe grisea 70-15
MGVIRKKTAARGAEGGVKYHCDVCSVDITSTVRIRCAHSACNDYDLCVNCFAQGSSSSNHQPATHPYRVIEQNSFPIFEEDWGADEELLLLEGAEIYGLGSWADIADHIGGYRHKDEVRDHYINAYVNSPRFPLPKRCSPHDNELANQTTREEFQARKKQRIEERRDAAKNAPALQPKTKPTASVPSCHEIQGYMPGRLEFETEHANEAEEAVQLMQFDPGDGINPRTGELEPETELKLTVMEVYNCRLTQRVERKKVIFEHNLLDYRENSKLEKKRSKEERDLLNKAKPFARMMNHDDFEAFSQGLIDELNLRQAITQLQEWRSLRIGDLKSGEKYEQEKAARIQKAIPLGSMDRDRLATNQRSKAPPPPDPPSGAALLVAPEMPARLATKGSHGNSLASENVEHAASNGDAVKSEVHANGGTNGDTGSVIVANGDSTVNGVTANGLVKKEKFELQPIPTLTPLQFTLDQTPDLQVLTPDEVKLCELLRIQPKPYLMIKEQLLKEALKTNGTLKKKQAKEICRLDNAKGSRIFEFFVNSGWVGKA

SEQ ID NO: 3621 - protein, 1168 aa, Gibberella zeae PH-1
MASQSVISINAKNITHIDLTVDDDSDRSGNLQRSSPPPPVRPTDTTTTQARFAPNFAIERHPSSTHAPVSPPKINRASASITAIQDKQPSTELPRPSPPVLKVEQKVTQVIAALDDAHSMARLSKVAASNVVSRQVTPTLEQDMDTSAQEPKPTSPKYQTPRKPEWDVASLAKKLVEYRQDIKNGHSRMTSYIIESTHPTERRSLTGANLFAGLTSKSMPAKKGETMKIKSKEHTKPKNNKREDHHSVVRIQTDEERVPRYRFHHVEIKKNILTPNTMLTFVPHLRDLETSEEYKYNLWLQELEDIDRKSGFKPMSREEKVRITVRSEFASTVLLYLESWLDKLSLPGCDKSTLIRYMASREPDNAITPRQKSDILNSHRPAGSTTPPGANRAADIFTEAFHRVFHQGQPLNKQIELRDVLLLDESVDSIMETKPTAKDVSSSQKQNEHEAIEYWLGTYSILGCLICFSHSCEHGEYDAQNCKRTLSMLPRLSETLKRRRRIPYEDKDMMNGHSRLCKRNCYQSSPRPEACSVQRPWNEEEQYVLRSAVATTDHSKVKKDPFCLVAQLLDRDCSGVFNEYERMNVSLPPLEPASKLQIRTVNWYDRFKKALIGDWENHTKTHEHQKRELSEHCSHEGPCTLESCICVQQSVLCEKFCGCTVESCAYKFTGCACHSQGRTCLSKQKDRPCICVQLNRECDPDVCGTCGVLDRADPENADDEVLHSTGCQNCPLQRGQAKGLALGQSQLEGVGYGLFTVEPIAQDDFIIEYVGELITHDEGVRREARRGDVFDEESNISYVFTLLENEGIWVDAATYGNLSRYINHASESDKRGCNITPRILYVNGEYRIKFTAMRDIAAGEELFFNYGENFPNLTKKLLDHKTGGKSGEGKKRTRRPNGEGVARKAPKTDKKKPGKGKKAQEALYEEDLTATLGFTPKPLRKRKKGALDDDSEEEEYHPTGTDASLLETPSDGESDYGTGKSSAPRFRKRPRQAVKAGVSDQSGKPRAVVKTRGKRGGARPGSGRPRKYPRNATSATSATSAPKTATTRLSVSVSVSEGTDGTEQKEEQTQKQIVVPDTIVRPIVPLRPQSEEINDSMEDVTLTKEPVDEYKGLRSQLEEDNEDDDNDDDDDDDDDQDVVVRSRIDRVARNRRLPAKLRDDGDWMSASQ

SEQ ID NO: 3622 - protein, 170 aa, Brassica napus
RDLAAAARGEGDETEGERASCSHGGGSCGSDDEDGANRDGSRKKLRLSKEEALVLEETFKEHSTLNPKQKLALAKQLNLRTRQVEVWFQNRRARTKLKQTEVDCEYLKRCCDNLTDENRRLQKEVSGLRALKLSPNLYMQMTPTTLTMCPSCERVSASSSAVAAPPPPSS

SEQ ID NO: 3623 - protein, 179 aa, Ostreococcus tauri
MSVAREKSHCVHTRTFRTALGGTEDERSRADRARAEVSLDAARGASRGTPNARVGRRGGRASQTGMGRKKIKIERIGDERNRQVTFTKRKNGLMKKAMELSVLCDCDIAMVIYNSHEKLYQYSSGEIEDVLERFHADRREAQEIRNNRDLFDQHFSSQPGALDRGKSQAGTSRRVGGER

SEQ ID NO: 3624 - protein, 332 aa, Zea mays
  misc_feature (110)..(110): Xaa can be any naturally occurring amino acid
MESGRLIFNAPGSGAGQMLFLDCGAGGGPGGGLFHRGGRPMLGLEEGRGVKRPFFTSPDELLEEEYYDEQLPEKKRRLTPEQVLLLERSFEEENKLEPERKTELARKLGXLQPRQVAVWFQNRRARWKTKQLERDFDRLKASFDALRADHDALLQDNNRLRSQVVSLTEKLQEKEDATEGGATADTAAPAVDVEASLADDVEEPAEPAATFEVLQEVKSEDRLSTGSGGSAVVDADALLYGRFAAAVDSSVESYFPGGEDHYHDCGTMGPVNHGAGGGIQSDDDGAGSDEGCSYYADEAAAAAAAAFFAGHATHHHADEDEDAGQISWWMWN

SEQ ID NO: 3625 - protein, 238 aa, Misopates orontium
MEFPNQDSERKNGRGKIEIKRIENTTNRQVTFCKRRNGLLKKAYELSVLCDAEVALVVFSSRGRLYEYANNSVRATIDRYKKASADSSNSVSTSEANTQFYQQEANKLRRQIREIQTSNRQMLGEGVGNMALKDLKSTEAKVEKAISRIRSKKNELLFAEIELMQKRELELHNANMFLRAKIAEGERAQQQQMNLMPGSDYQPMTSQSYDVRNFLPMNLMEPNQQQYSRHDQTALQLV

SEQ ID NO: 3626 - protein, 278 aa, Triticum aestivum
MMSGNNQQQQSAAAAEEEQELARKHAAAVATSRQWSSQTESRIVRVSRVFGGKDRHSKVKTVKGLRDRRVRLSVQTAIQLYDLQDRLGLNQPSKVVDWLLNAARHEIDKLPPLQFPPHQVDLMDHMMTSSSMPLMPHVDDKFCHFASTLARDGGVKAGADADGGGAHHNIGRFGYHRFMGLNNNSLGLVNSGMPYNFTGESWNNSSVDQSSGAGSPQVSIAAAAAAHHSAFPSLLSLAPRSHQLVYYSSEADQFPVDDLGSQSLSLSSARAFHDQTGS

SEQ ID NO: 3627 - protein, 201 aa, Aquilegia alpina
AGIVKKAKELTVLCDAEVSLLMVSSTGKMHEYISPSCTHKNLYDRYQQASGSNLWQPHYERMQDTLQKLKEVNNKLRKEIRQRNGEDLDELSFQQLRGLEQNMEKSVECVRNRKFHQISTSTDTYKKKIKNHEETHNSLLREFEERDADFSFPALDFEGDYQSTIGFATGNPQIFAFRLQPKLQSDLQDEEAYGSYGLSLA

SEQ ID NO: 3628 - protein, 155 aa, Nymphaea tetragona
  misc_feature (117)..(119): Xaa can be any naturally occurring amino acid
TTNRQVTFSKRRAGIIKKAKELTVLCDAHVSLLLFSSTQKFFEYCSPTTTMKKMIDRYQQVTGTNLWDSHYESMQKEFNKLKEKNERLRKSIRQRIGENLDELNHSELWVLEQNLSXXXKKIRSTLENKIKRQIDTCRKKVNGLSKSNIYFVGMD

SEQ ID NO: 3629 - protein, 328 aa, Brassica napus
  misc_feature (260)..(260): Xaa can be any naturally occurring amino acid
MSSSVRKNMERIKGPWSPEEDELLQSLVQKHGPRNWSLISKSIPGRSGKSCRLRWCNQLSPEVEHRGFSPEEDETIIRAHARFGNKWATISRLLSGRTDNAIKNHWNSTLKRKCNGVASDGYDGNIGGNGGYDGNLGEEQPLKRTASGGGVSTGLYMSPGSPSGSDVSEQSCGVPHVFKPTARSGAVTEVTASTSGEDPPTCLSLSLPWNNRCETETVRVNEPTQVNENTVTDGGYTAELFPVRKEEVEEEKGISGFGGXFMTVVQEMIRTEVRSYMADLQRGNVGGGGSIGGSGGGGVGSCMPQSVNSRRVGFREFIVNQIGIGKME

SEQ ID NO: 3630 - protein, 696 aa, Aspergillus oryzae
MSLKPIILHGHSAGPNPWKVAMLLNELNVPYEYKYLQFAEIKRTDNPLDAPASPKAQNTEGEPEDEEMGGTETEPKKESEGADENADGVAQSGAEGATEDQSGQGKSSIESSARSHLVSQTHAIILPSYSTWFDMHTVHPIEKKALAEFFNGRNRSKTPAVYKDYRDFMINTYRLNPIEYLTVTACRRNLAGDVCAIMRVHSFLEQWGLINYQVDPQTRPSNIGPPFTGHFRVIADTPRGLQPFQPGPNHFVKPGKPLPATERAASAAPASKADLNLEIRRNVYDDKGKEITPAAEDKEKQTNGDGSTNGATGDAVKAMETASKEPRKKSHCFSCGIDCTRLRFHYAKSTPATANASAPDSKYDLCPNCFLQGRMPSSHSASDFVKLEDNAYSVVPDKDAPWSDSELVLLLEGLENFDENWEQIANHVGTRTKEECVMKFLQLEIEDKYVEDLPDMRTAGGREPISQSENPVLSVVAFLAQMAEPAVAAAAAGRSVDEIRKELRKQLEKGSDKSQEKGKEKEGSGVKTEDSMDVDASTAEVVETSSSDKQSKASLPTVALATSAARAGALASHEEREMTRLVSAAVNVTLQKFEIKLQQFNEMEEIIEAERRELELARQQLFLDRMAFKKRVKEVQDTLQAVSLKGPGEDANNMLGEAATAGIGNRFNFQPAGSDARAGVQPLSAEAGADYKTLDL

SEQ ID NO: 3631 - protein, 307 aa, Oryza sativa (indica cultivar-group)
MERLQRIFGASGMGQPPSDSPLLDSSEQVYISSLALLKMLKHGRAGVPMEVMGLMLGEFVDDYTVRVVDVFAMPQSGTGVSVEAVVHVFQTNLLDMLKQTGRPEMVVGWYHSHPGFGCWLSGVDINTQQSFEALNPRAVAVVIDPIQSVKGKVVIDAFRLINPQTMMLGQEPRQTTSNVGHLNKPSIQALIHGLNRHYYSIAINYRKNELEEKMLLNLHKKKWTDGLILKRFDTHSKTNEQTVQEMLNLAIKYNKAVQEEDELPPEKLAIANVGRQDAKKHLEEHVSNLMSSNIVQTLGTMLDTVVF

SEQ ID NO: 3632 - protein, 174 aa, Arabidopsis thaliana
MAYEKVNELNLKDTELCLGLPGRTEKIKEEQEVSCVKINNKRLFEETRDEEESTPPTKTQIVGWPPVRSSRKNNNSVSYVKVSMDGAPYLRKIDLKTYKNYPELLKALENMFKVMIGEYCEREGYKGSGFVPTYEDKDGDWMLVGDVPWDMFSSSCKRLRIMKGSDAPALDSSL

SEQ ID NO: 3633 - protein, 184 aa, Glycine max
MDHQPPPCPAAASATDNPRGGTRHPMYRGVRKRRWGKWVSEIREPRKKNRIWLGSFPVPEMAARAYDVAAYCLKGRKAQLNFPDDVDSLPLPSSRTARDIQTAAAQAARMMKASGNDEKSGIASDDGDSGCDDFWGEIELPELMDGECCWGCPAGASSWTSSGDLAEWPEEELSPQQPSFMACL

SEQ ID NO: 3634 - protein, 283 aa, Thellungiella halophila
MGLDQESSSVPPGFRFHPTDEELVGYYLKKKVASQKIDLDVIREIDLYKIEPWDLQERCKIGYEQKEWYFFSHKDKKYPTGTRTNRATVAGFWKATGRDKAVYLNSKLIGMRKTLVFYRGRAPNGQKSDWIIHEYYSLESHQNYSPPQEEGWVVCRAFKKRSTVPTKRRQRLWDPNCFFYDATLLEPLDKNVLKRAKHNTDFAVTVPFKHIVDDEDLGSMHLHSIDDDQFSQLPQLESPSLPSDKLPEMARQSTRALEDEKRITDWRSLDKFVATQFLMSGQD

SEQ ID NO: 3635 - protein, 90 aa, Oryza sativa (japonica cultivar-group)
MAQQARAQWPQKQNKLFEQALAVYDKETPDRWHNIARAVGGGKSAEDVKRYYEMLEEDIKHIESGKVPFPAYRCPAAAGYQAERLKHLKI

SEQ ID NO: 3636 - protein, 349 aa, Triticum aestivum
MKVLCSACEAAEARVVCCADEAALCARCDRDVHAANRLAGKHHRLPLLSAASNPPAVSAPNCDICQEGHAYFFCVEDRALLCRSCDVAVHTANAFVSAHRRFLLTGVQVGLEPDEQEESVPEPEPEPQPPNNASSAPLPPPMCHRKRSPTPLYSDGDIDWAAGSDVGITGNLPDWSVIDEQFGSATPAMRPAEPEVIKAPPKKSPRVAVTAASAALFGGSMPDWPLDEFFGFTEFNSGFGFAENGTSKADSGKLSSPNRGSLSSSSSGNAAQNAQDFFGQVPEVQWSRSTMPELPSPPTASGLHWQGDPRYGSAADSAAVFVPDICSPENPFRCFAAGADQQLKRRRRC

SEQ ID NO: 3637 - protein, 362 aa, Oryza sativa (japonica cultivar-group)
MELGLSLGEAMADAGRELVLGLGMGRREEAAEAGRRDHEVRRELEFGSMSSRCGGSSPEPTVRLTLLPMVPGLGLPWPPPPPPSSESRHLEASTRGFDVNRPPSSGGGGGGGGAEEEQDDVAGAALSSSPNNSAGSFPMDDFSGHGLGGNDAAPGGGGGDRSCSRASDEDDGGSARKKLRLSKEQSAFLEESFKEHSTLNPKQKLALAKQLNLRPRQVEVWFQNRRARTKLKQTEVDCEYLKRCCETLTEENRRLQKELAELRALKTVHPFYMHLPATTLSMCPSCERVASNSAPATASSAATSSTAAPPAAPSSGGIAATSSSAAAAAAPDHRPSSFAALFSSPRGFPLSVAPQAQPPTSS

SEQ ID NO: 3638 - protein, 308 aa, Glycine max
MGEKDDGLGLGLSLKLGWGENNDNNNNQQQHPFNVHKPPQSVPNQRVSVNSLFHFHDRSSEMRSFFRGIDVNLPPPPPSAALAAFDDENGVSSPNSTISSISGKRSEREGNGEENERTSSSRGGGGSDDDEGGACGGDADADASRKKLRLSKEQALVLEETFKEHNTLNPRQKQALAKQLNLMPRQVEVWFQNRRARTKLKQTEVDCEYLKRCCENLTEENRRLQKEVQELRALKLSPQLYMQMNPPTTLTMCPSCERVAVSSASSSSSATMPSALPPANLNPVGPTIQRPMPVNPWAAMLNQHRGRP

SEQ ID NO: 3639 - protein, 307 aa, Zea mays
MAEQPRINSALVEVIRMAKISKNPNSAGSAVPYHYLRNDDRPDKAFTTDRAKRAGKANASSGQIFVTIAPDHFGPILAENDPRRNMGVRVGETWEDRLECRQWGAHFPHVAGIAGQSTHGAQSVALSGGYEDDEDHGEWFLYTGSGGRDLSGNKRTNKEQSSDQKFEKLNAALRISCLKGYPVRVVRSHKEKRSSYAPESGVRYDGVYRIEKCWRKIGIQGKFKVCSDDHGDRPRPLPKIKELQGATDITERKGRPSWDYDDKDGWKWVVPPPVSRKPVLSGDPETDKQIRRATKRVHLSVAERLLK

SEQ ID NO: 3640 - protein, 284 aa, Oryza sativa
SLLLLSSRPPLMGCKACQKPKVHYRKGLWSPEEDQKLRDFILRYGHGCWSAVPVKAGLQRNGKSCRLRWINYLRPGLKHGMFSREEEETVMNLHATMGNKWSQIARHLPGRTDNEVKNYWNSYLKKRVEGAEAAARKSAEPADVVTGSPNRSETGQERVAADRPASSESSGPVESSSADDSSSLTEPAAGLAAVRPHAPVIPKVMFADWFDMDYGTSLAGTAPGLSYQGSSSVQVDVPCGGAVDSLHGLGDGGFCWDFDDAADHMQGGGGLCDLLSMSEFLGIN

SEQ ID NO: 3641 - protein, 220 aa, Populus tremuloides
MVRGKTQMRRIENATSRQVTFSKRRNGLLKKAFELSVLCDAEVALIVFSPRGKLYEFASSSMQETIERYRRHVKENNTNKQPVEQNMLQLKEEAASMIKKIEHLEVSKRKLLGECLGSCTIEELQQIEQQLERSVSTIRARKNQVFKEQIELLKQKEKLLAAENARLSDECGAQSWPVSWEQRDDLPREEQRESSSISDVETELFIGPPETRTKRIPPRN

SEQ ID NO: 3642 - protein, 256 aa, Triticum aestivum
EEVEMGRGRIEIKRIENTTSRQVTFCKRRNGLLKKAYELSVLCDAEVALIVFSSRGRLYEYSNNSVKATIDRYKKAHACGSTSGVPLIEVNAQQYYQQEAAKLRHQIQMLQSTNKHLVGDSVGNLSLKELKQLESRLEKGIAKIRARKNELLSSEINYMVKREIELQSDNIDLRTKIAEEEQQLQQVTIARPSAALELNPFTALDMKCFFPANLFEAAVQAHAQARTQAQAQASLQLNLRYQQLAPPGAGDVAHQF

SEQ ID NO: 3643 - protein, 225 aa, Elaeis guineensis
MGRGRVQLRRIENKINRQVTFSKRRSGLPKKAHEISVLCDAEVALIIFSTKGKLYEYATDSCMERILERYERYTYAEKALISSGPELQGNWCHEFGKLKAKVEALQKSQRHLMGEQLEPLNLKELQQLEQQLESSLKHIRTRKCQLMFESISELQKKEKSLQGAEQDAGEGAHGRSKKVEGTKPARPLGATRAAAKQTHSFPNLPSWIRRTLSPTLEIFGDLTNG

SEQ ID NO: 3644 - protein, 518 aa, Arabidopsis thaliana
MIAFLGFLCFLSKSGSFFSFIEMMDLQEETGEVKIEDQCVENKQSTPASCSSVSEGSAGSSHKSPTIASPATVSPTHRYLGRTSGPIRRAKGGWTPEEDETLRQAVDTFKGKSWKNIAKSFPDRTEVQCLHRWQKVLNPDLIKGPWTHEEDEKIVELVEKYGPAKWSIIAQSLPGRIGKQCRERWHNHLNPDINKDAWTTEEEVALMNAHRSHGNKWAEIAKVLPGRTDNAIKNHWNSSLKKKSEFYLLTGRLPPPTTTRNGVPDSVTKRSSSAQKRVFGSVAQTSSVTTDVNNLAEDGNGQINSSVPVEEVVAASRMTSLNEYARSPQLPNPEPLPENGGAANNGYHLYYTPQIDYYRASEVDTQRMYGNECGCSPSASPVSFFTPPPCRNVHSNGSTPRSPESYLREAGRTYPNTPSIFRKRRPRVVVQDNNNAKKTDEAKEVDQKVNDGKDSSEIQNNGSNAYNLSPPYRIRSKRTAVFKSRQLEFISREEEKADDETKSSEKDMLIDGDSQLLG

SEQ ID NO: 3645 - protein, 563 aa, Zea mays
MGAMAEVVQEGCVENRQPLAASSSSVSDGSSCGGGGRAGTSPPVSSSGNSISVLRRTSGPIRRTKGGWTLKEDETLQKAVVAFKGRNWKKIAEFFQDRTEVQCLHRWQKVLNPELIKGPWTQEEDEKIIDLVGKYGPTKWSIIAKSLPGRIGKQCRERWHNHLNPEIRKDAWTPEEERALIDAHQVFGNKWAEIAKVLPGRTDNSIKNHWNSSLKKKLEAYSNSSVLSVSKLFVHDDFKDKMKPVATDGHLDLNQMPSIGSKDSSGRAYHSIVSPLSQAYNLDSSCLSLSIPTMQPLTSHEMSSLIDGSAVTLVVQCLESDSVRDKDQEIDSVQEKGVEVSSTPDPVGVELESAPAKRGAELSSKNELHSTLGPLCYQILNMEDVIPISTPLCSEHNGAHQTSQQCMSPNGYTSLSPTIGKVSSQLTVDSILRMAADSFPCTPSILRKRKRNKATPGSGNELKTGGVNNDSFYTPNGTNGKDTTPRSFKTAASFSSLGSVDGLLTSVRSFDSSPPYQKRSKRMAIIKSVEKQLDFSADGLDTSGSEIMNSPCHNSQGVDSNRM

SEQ ID NO: 3646 - protein, 64 aa, Oryza sativa (japonica cultivar-group)
GKKMLVPLTASLYVPGTLDDSEKVLVDVGTGYFIEKTMTEGKEYCERKINLLKSNFDELVEVCY

SEQ ID NO: 3647 - protein, 601 aa, Aspergillus nidulans FGSC A4
MYLRLVRIQAKKGLKEFNLYLHRKLATYHIRLRGVTFTTPPTTRKRKAALAASPTSTTATQSCSRSRAATTTTADSFLDIPDSGSARKRQKKTRKQCPDSAAELTSTNSFNFEREVSESPAKVEASEFVTSTSTTMESDDDFMSVASSADDFLGTQGSDDESLGDDFGDDFDGGFSKDKDIFSNTRKPYEVDFKVLSPEDIEREQNLQINEVSSILGLPPESSAILLRFGRWNREKLIESYMDHPELTLEEAGLGTNFESTPKTEVVPGFTCDICCEDGDDLETYAMRCGHRFCVDCYRHYLAQKIREEGEAARIQCPGNDCHMIVDSKSLSLLVTDDLKDRYQTLLTRTYVDDKENLKWCPAPNCEYAVDCHVKQQKNGGCNHMTCRKCKHEFCWMCMGLWSEHGTSWYNCNRFEEKSGAEARTEQARSRASLERYLHYYNRYANHEQSAKLDKDLYLKTEKKMTSLQSQSGLSWIEVQFLDTASQALQQCRQTLKWTYAFAYYLARNNLTEIFEDNQKDLEMAVESLSEMFEKPVGELANLKVDILDKTAYCNKRRVILLSDTAENLKNDLASMLDYLLKARTDGSLRLIMDILADPGR

SEQ ID NO: 3648 - protein, 360 aa, Nicotiana plumbaginifolia
FSAKSSIFKFESYTCTEVTKDIMQAMNQYDPTSSHDDFLDQILSSVPSSSPCWPDLSKSWDPHHHHLSPPLPPNPSSGDDHQPPPSNPLQHFQYDDQSSSFLAAKLRQHQITGGGGGGGGAVAAAKALLLQQQLLLSRTLAGNGLRSPTGASGDNGFLNMLGNGDQNDGVGNPANDSSVQALFNGFTGSLGQNSSQPQHFHHPQGGTMQAQSFGAPATAPAMNQTPAASGSAGGGTTPAAQPKQQRVRARRGQATDPHSIAERLRRERIAERMKALQELVPNANKTDKASMLDEIIDYVKFLQLQVKVLSMSRLGGAAAVAPLVADMSSEGRGEGNGGRGGNGTASSSNNDSMTVTEHQV

SEQ ID NO: 3649 - protein, 265 aa, Oryza sativa
MGRGKIEIKRIENKTSRQVTFCKRRNGLLKKAYELAILCDAEIALIVFSSRGRLYEFSNVNSTRSTIERYKKASASTSGSAPVIDVNSHQYFQQEAAKMRHQIQTLQNANRHLIGESIGNMTAKELKSLENRLEKGISRIRSKKHELLFSEIEYMQKREADLQNENMFLRAKVAEAERAEHDDQQAAEDDEMAPAPAVGGGSSSGTELEALPATFDTREYYQPAPPVSMLAAAAAAAAAQYSSDHHQTALHLGYFKVDSGKGGLL

SEQ ID NO: 3650 - protein, 211 aa, Oryza sativa
MPGALHVSRTCNLIGCVISILHPGKGNADEVDGIRSEDVACLICQELLFDPSVLNCGHVYCMPCLTSVGGEELECQFCGAPHPAEPTVCSNLKNFLKHRFEELYNSRQEKSSGVPSRKEGTRKGKPSEILHTHVGVGCDGCGVFPIQGRRYSCKECEAPGLDLCEKCFMTGSTAEGRFDQKHTADHDMELDDSFLFPNLVDYMDDLYIDMT

SEQ ID NO: 3651 - protein, 210 aa, Orchis italica
MGRGNTEIKRIENSTNRQVTFSKRRSGIIKKAREISVLCDAQVSLVIFSSLGKLSEYCSPSTTLSKMLERYQQNSGKKLWDATHENLSAEIDRIKKENDNMQIELRHLKGEDLNSLNPKELIPIEEGLQNGLTSVREKQMDFLKMLRKNERMLEEENKRLKYLLQHQQLAIEGSMRELEISYHQKDPEYADQMPMTFRVQPFQPNLHGNN

SEQ ID NO: 3652 - protein, 274 aa, Arabidopsis thaliana
WMSLQSQRIPELKQLLAQRRSHGDEDNDNKLRKLTGKIIGDFKNYAAKRADLAHRCSSNYYAPTWNSPLENALIWMGGCRPSSFFRLVYALCGSQTEIRVTQFLRNIDGYESSGGGGGASLSDLSAEQLAKINVLHVKIIDEEEKMTKKVSSLQEDAADIPIATVAYEMENVGEPNVVVDQALDKQEEAMARLLVEADNLRVDTLAKILGILSPVQGADFLLAGKKLHLSMHEWGTMRDRRRRDCMVDTEVIFDACTTVNSGPRPTETTNNERN

SEQ ID NO: 3653 - protein, 185 aa, Zea mays
WSTAAACEEEPEPHHDHRQQAGQGGRPPRGKGAAVSEGSAAALGVGAVRMKKAGGGGGGKARRKVREPRFCFKTMSDVDVLDDGYKWRKYGQKVVKNTQHPRSYYRCTQDNCRVKKRVERLAEDPRMVITTYEGRHVHSPSRDEDDDAARANAEMSFILVACRSGSDDRRPSLFSQCIQRRPPPV

SEQ ID NO: 3654 - protein, 317 aa, Triticum aestivum
MDFGGDMDDFSLQYIHEQLRLQLLGADPCGLLPLPAADDFAAQPDFIPAEFLPQPLPAFVDLTATDYADAAAYRAAAEPVIIRFGGEASPVSDPARRPSLTISLPPASHAWAQAPVLAAEAAAAVDANDFRKYRGVRQRPWGKFAAEIRDPNKRGSRVWLGTYDTSIEAARAYDRAAFRMRGAKAILNFPNEVGSRGATDFVAPPPSQTARAAPTSHNKRKRQEAAEPCVEVVRDATKHSKADASASPASSLTSTPTSTVTSGTTTPSSSDAGGYYEMSFPLASPTSWTWDQLLAEGMFGSLSPRQQLGSFPEVTVN

SEQ ID NO: 3655 - protein, 79 aa, Brassica napus
GSFKVCRYLFVRCDNEPAPWTSDEHGDRPRPLPNIPELKMATELFERKESPSWNFDVSFVSLLSSHSLVPIRLDQIPNY

SEQ ID NO: 3656 - protein, 1111 aa, Candida glabrata CBS 138
MSQYRRYFDESDPNQSRYSSRNGNGSYYQSRGSQRYNYEGQPDESGYRKDYQKSLGAGNGQYNNRQYSRNDNGSSNNVPQGRYTPTEYSSRRSFHHNDAEIKLPSAPSRVQYSYKARNSETKDPNAYRPNHTDQSYIRGRNSNGKSYGPVNIPTGPQQSRIVSNRNHNQHNVSLRPKATVKYKNIEQLTCKYHYFDPVEKVLTHRTEMKKWTEVNKDMPEVGFVVQQETINGQVKSVIKSRKPDEKSTDPRKTTIPNTGNSSTKKKQRTARKCRKELTLVPRISYDKFSLGPPPSTEVVVFAENFSNTQMANIPDISIKNYFRKFGELAHFASYSDPKTALPLHLYLVKYTHPSGKINDSAKAAYQAVKSCQEQKCCILGCNFNVLLNKNNELENIMNKRITVLSKETEKVKLQMEQEKKSALKKSAELNKEEKGILKPLKTIPGDLRPIVNNRPALYISRRFISVMGLRLIDFKSKLKAYKCSRFLEHATGFYIIFNNLEHAKLCMDAESGKLTMASRRKRTTVPINFILIEPFTSRFSKKYKDVPSDSKEKVEIVRYNNKEELIDAASKYIIEDLAKTLHTEIRKTMIGPAVFDTLQPSNFPQLVQKRKEQEELKKADMEKKKAEQAKSKDFNIFNLYASYTNKPKRRQKRYLSDEEAEEELPQKKIKPLAHLLDEVREDSPTSGLESTDDPTEGDNMSTSSSSEDEDDIMDDFQNEDKKDDMFSTPETNEEMDYHHKIDYRTENLIDKEIDDASQVNERYLPSATQFPVTVYPENTYDSEYIDTVSLFDLQDAIKDEEDMEFLKECLPAGEDLEFDDDNGLLEYRIWKIKQMADISQSSTNNELRLNNQTLDKTLFEKNIPFIASEFKHIPEKLKSSYLPHKRRVHEPLNTVSHHNESKEQSPDIAIKEKSVNKADTGEGSLAEISSSRDNRASNRRFQQNIEAQKAATGTESELLSLNQLNKRKKPVTFARSAIHNWGLYALEPINAKEMVIEYVGERIRQPVAEMRERRYIKNGIGSSYLFRIDEHTVIDATKKGGIARFINHCCEPSCTAKIIKVGGKRRIVIYALRDIAANEELTYDYKFERETDAEERLPCLCGAPSCKGFLN

SEQ ID NO: 3657 - protein, 314 aa, Oryza sativa (japonica cultivar-group)
MARRSRRRTAVPHALAAEILRCCDRALAALRAGGDAESSSADTKRKPATAQPSTRRRRRYIYMYVSSRSCDGARDRAATQQEIFCRATASGGGAAAAAEPARVEKARTSEDGFLWRKYGQKEIKNSKHPRLYYRCSYKDDHGCTATKQVQQSEEDPSLYVITYFGDHTCSCQTAAAAAMDDDDDDENSQHFVINFGPATASRSGSPPLLYDDGDDGDVWRETAATPPSSRQSRCSPEGDGEESGVKMSKEEPVDSCPGPSAVSSPADVVSCSSPAMEPDLLGCLNWDDDFGDSSFVDADEFMNFDEIDLFQIYS

SEQ ID NO: 3658 - protein, 297 aa, Oryza sativa (indica cultivar-group)
MGCRSCDKPKMNYRKGLWSPEEDQRLRDYIVKHGLGCWSAVPAKAGLQRNGKSCRLRWINYLRPGLKRGMFSQEEEDIVINLQAKLGNKWSQIAMHLPGRTDNEVKNYWNSYLKKRVMQAQGSIPNNVAAAAAEVTSMSTTEPPSLHHHHHHPHHHQIKNSSGSTTTSHDQDANLSSGGSHGGISAPAPVAEPFDQQPKSFVFTGDWMPMSAAAAGQESYSISAQHWPASTASSGNVTPSHGGAFGDQMSGSYGALQQQHQSSAAAAPMAGVGGYFDLLNMGDIYGGFAATSDDLLF

SEQ ID NO: 3659 - protein, 290 aa, Zea mays
GDRAWMGVQTMSSHSHGDDGRRGLPRQGSVYGLTLTEVETQLGEPLRTMNLDDLLRTVLPASAAAAAGPPPPPAPAAKKTVDEVWRDIQSAGGGGGGRQPSMGEMTLEDFLSRAGVAVDAAPHWMHQYPQQQQYALPRPLPLPGPALDAAYHGDRPGVFLSHSQVAGRKRAATGAVAGDGVVERTVERRQKRMIKNRESAARSRARKQAYTNELENKVARLEEENKRLIELKVLKPLEPLEPPPAEQNKKQPPPQPKRKQPQPPPPPPPPIQQLPPKHRHDLRRTNSATF

SEQ ID NO: 3660 - protein, 258 aa, Triticum aestivum
  misc_feature (129)..(129): Xaa can be any naturally occurring amino acid
NILIEKICLCLGLGLLLSSSSSPFPCSCFRIGLSPVMGATSPSGLELTMAVPGLSSSSGSEGFVCNNNISNNGGGNMRGLDMNQPASGGEEEDFLMGGVEEDEEERGAGGPHRPKKLRLSKEQSRLLEXSFRLNHTLSPKQKEALAIKLKLRPRQVEVWFQNRRARTKLKHTEMECEYLKRCFGSLTEENRRLQREVEELRAMRMAPPTVLSPHTRQPLPASALTMCPRCERVTAATGPRITRPPASPFHPRRPSAAF

SEQ ID NO: 3661 - protein, 1080 aa, Saccharomyces cerevisiae
MSNYYRRAHASSGSYRQPQEQPQYSRSGHYQYSNGHSHQQYSSQYNQRRRYNHNDGTRRRYNDDRPHSSNNASTRQYYATNNSQSGPYVNKKSDISSRRGMSQSRYSNSNVHNTLASSSGSLPTESALLLQQRPPSVLRYNTDNLKSKFHYFDPIKGEFFNKDKMLSWKATDKEFSETGYYVVKELQDGQFKFKIKHRHPEIKASDPRNENGIMTSGKVATHRKCRNSLILLPRISYDRYSLGPPPSCEIVVYPAQDSTTTNIQDISIKNYFKKYGEISHFEAFNDPNSALPLHVYLIKYASSDGKINDAAKAAFSAVRKHESSGCFIMGFKFEVILNKHSILNNIISKFVEINVKKLQKLQENLKKAKEKEAENEKAKELQGKDITLPKEPKVDTLSHSSGSEKRIPYDLLGVVNNRPVLHVSKIFVAKHRFCVEDFKYKLRGYRCAKFIDHPTGIYIIFNDIAHAQTCSNAESGNLTIMSRSRRIPILIKFHLILPRFQNRTRFNKSSSSSNSTNVPIKYESKEEFIEATAKQILKDLEKTLHVDIKKRLIGPTVFDALDHANFPELLAKRELKEKEKRQQIASKIAEDELKRKEEAKRDFDLFGLYGGYAKSNKRNLKRHNSLALDHTSLKRKKLSNGIKPMAHLLNEETDSKETTPLNDEGITRVSKEHDEEDENMTSSSSEEEEEEAPDKKFKSESEPTTPESDHLHGIKPLVPDQNGSSDVLDASSMYKPTATEIPEPVYPPEEYDLKYSQTLSSMDLQNAIKDEEDMLILKQLLSTYTPTVTPETSAALEYKIWQSRRKVLEEEKASDWQIELNGTLFDSELQPGSSFKAEGFRKIADKLKINYLPHRRRVHQPLNTVNIHNERNEYTPELCQREESSNKEPSDSVPQEVSSSRDNRASNRRFQQDIEAQKAAIGTESELLSLNQLNKRKKPVMFARSAIHNWGLYALDSIAAKEMIIEYVGERIRQPVAEMREKRYLKNGIGSSYLFRVDENTVIDATKKGGIARFINHCCDPNCTAKIIKVGGRRRIVIYALRDIAASEELTYDYKFEREKDDEERLPCLCGAPNCKGFLN

SEQ ID NO: 3662 - protein, 258 aa, Zea mays
GPGVPPPGVGPPQPDETDSLQQVGWKLAQFAHTIRVDFQYRGLVAATLADLEPFMLQPEGEEDPNEEPEVIAVNSVFEMHRLLAQPGALEKVLGTVRAVRPRIVTVVEQEANHNSGTFLDRFTESLHYYSTMFDSLEGGSSGGPSEVSSGAAAAPAAAGTDQVMSEVYLGRQICNVVACEGAERTERHETLGQWRNRLGNAGFETVHLGSNAYKQASTLLALFAGGDGYKVEEKEGCLTLGWHTRPLIATSAWRLAAP

SEQ ID NO: 3663 - protein, 408 aa, Oryza sativa
  misc_feature (45)..(45): Xaa can be any naturally occurring amino acid
  misc_feature (107)..(107): Xaa can be any naturally occurring amino acid
  misc_feature (118)..(118): Xaa can be any naturally occurring amino acid
MSFRSLIQEMRDEFGSISRHSLRSRSHRGGGGAPRVAAVGPAEAXAMQQSCWAQLPPELLREVLEVRIEESEVWWPSRRDVVACAGVCRSWRGITKEIVRVPEASGXLTFPISLKSTXVQPGPRDGTLKCFIRRNRTTQTYYLYIGLTEALADDGKFLLAARKCRKPTCTDYLISLDMSDMSKGSNTYIGKLRSNFLGTKFTVYDAHPPYDGAVVSKSRSARVVGLNQVSPRVPAGNYPVSHISYELNVLGARGPRRMNCIMDSIPTSAVQEGGKAPTQTEFPLSGLDSFPSISFFRSKSARIDSATSQLSTQKEEKLVLKNKSPRWHEQLQCWCLNFRGRVTVASVKNFQLVASDENGPTNQEQDKVILQFGKIGKDLFTMDYRYPISAFQSFAICLSSFDTKIACE

SEQ ID NO: 3664 - protein, 193 aa, Lactuca sativa
MAEVAQKLEHLEGVLGNDDGLSQLASVSVHYNPSDLSSWLESMICELNPTNQPTVIDDSFVNNTSSVTPSAVDSSSVFVDDLQRIPGNAIYPPAKKQKPSSPSTGASSSYNPNPIVLVDTQENGIRLVHTLMACAEAVQQDDLKLAETLVKQAGILAVSQAGAMRKVATYFAEALARRIYRLYPKTPQDSPAF

SEQ ID NO: 3665 - protein, 242 aa, Lactuca sativa
MAEVAQKLEQLEMVMGEDGILQLSDTVHYNPSDLSGWVQSMLSELNTNSSDNSSSTNFGIVLPGESSSTTMIDFSNNKQIDTQQTGGKMYDDDPYDLRAIAGGAIYGTTAEESPVSRNGIKRMKAAAPGSEAVDVPPESPKPVVLVDSQEVGIRLVHTLMACAEAVQQDNLKLADALVKHVGLLAASQASAMGKVATYFAGALAQRIYKIYPQDGLETSCWEILQMHFYESCPYLKFAHFTA

SEQ ID NO: 3666 - protein, 232 aa, Brassica napus
EDMETGNDDDEGDWDAKFENLVPPPLDVLSSEFTHGLRKPVPTLRQSSSSEVSSTIDNSLHDVKVSTLFQSSSALSVLANGSVSFPLKGTRSNLRKRPTPPTFRSLKSFASEMVQQFAPDDPDSETYLPFAKKKRQRKNKDQSSVSDSPEQFNADGTIRMCTHCETTKTPQWREGPCGPKTLCNACGVRFRSGRLLPEYRPSSSPSFIPSLHSNSHRKIIEMRRKDQDLQPG

SEQ ID NO: 3667 - protein, 271 aa, Neurospora crassa
MDPQNPSSAGHNQQQRQQPVYDTSQGGHYGASAALSQQGFAPSDLYTGTWANVHQGHQGNYKENLTAYWQQTINHLENDTHDYKLHQLPLARIKKVMKADPEVKMISAEAPILFAKGCDIFITELTMRAWIHAEENKRRTLQRSDIASALSKSDMFDFLIDIVPREEASTHAKRATGQSAAAAAQAAQNAAQQAQGMPGVAAPNHGGQHPMAAPDYTLGGHAIAPEADYRQQNMYSGQVQPGAPAPYGQPQPPMYDVDGMYYSTMPPQQNA

SEQ ID NO: 3668 - protein, 199 aa, Arabidopsis thaliana
MEQSEEGQQQQQQGVMDYVPPHAYQSGPVNAASHMAFQQAHHFHHHHQQQQQQQLQMFWANQMQEIEHTTDFKNHTLPLARIKKIMKADEDVRMISAEAPVIFAKACEMFILELTLRAWIHTEENKRRTLQKNDIAAAISRTDVFDFLVDIIPRDELKEEGLGVTKGTIPSVVGSPPYYYLQQQGMMQHWPQEQHPDES

SEQ ID NO: 3669 - protein, 249 aa, Fragaria x ananassa
MAYENKPNTDLDADAQRRLGRGKIEIKRIENTTNRQVTFCKRRNGLLKKAYELSVLCDAEVALIVFSNRGRLYEYSNNSSVRETIERYKKACADTSTNGSASEATTQYYQQEAAKLHNQINALQNINRGYMAEGLSNKNIKELKGMERKLERAITRIRSKKNELLFAEIEYMQKRELDLHNNNQLLRAKIAENERQQQSIIAITGGHGSYEIVQPTQPFHEARNYFQVNALQPNIHQYSCHDQVSLQLV

SEQ ID NO: 3670 - protein, 319 aa, Oryza sativa (japonica cultivar-group)
MGGGGGVEADCDRIRGPWSPEEDEALRRLVERHGARNWTAIGREIPGRSGKSCRLRWCNQLSPQVERRPFTAEEDATILRAHARLGNRWAAIARLLQGRTDNAVKNHWNCSLKRKLAVATTTTTTTTGAAAAPGVVADAAELVERPCKRFSPTPDSPSGSGSGSDRSDLSHGGGFGQIFRPVARTGAFEPVDCAISRRQEEDPFTSLSLSLPGTDQRFNHDSAHSHFQELPSSPSPPPPPPPAAAASTTQYPFTPGVRRRDAGDDPRRGAQVHCEPSASAPVAPTPAVPTSTCRSWWRASCAPPRSASGGCTDQKPSVH

SEQ ID NO: 3671 - protein, 202 aa, Clematis integrifolia
NGIIKKAQELSVLCDAEVSLIMFSSTGKCTSFISPTISPKEFYDRYQQAAGTDLWQSQYQEMHNNLRKLMEINSKLRREIRIRVGEDDLTELDFDELHRLEQHLENSSKIVRQRKFSQIATHTETARKKIRSQEQIHTNLMQDNYEQIEKQYALANHQSISSLELATDGAGGSHIFAFRLHPGQPHVHGDEGDYDFHQLRLA

SEQ ID NO: 3672 - protein, 88 aa, Triticum aestivum
  misc_feature (60)..(60): Xaa can be any naturally occurring amino acid
  misc_feature (62)..(62): Xaa can be any naturally occurring amino acid
  misc_feature (65)..(65): Xaa can be any naturally occurring amino acid
  misc_feature (68)..(68): Xaa can be any naturally occurring amino acid
  misc_feature (71)..(72): Xaa can be any naturally occurring amino acid
  misc_feature (74)..(74): Xaa can be any naturally occurring amino acid
LGAETLAAAADDREQAQMGGKCPHRKVKKRRLNCKQVRRGKFLVKADDAVYERVVKLADXGXDSXGKXLPXXKXLPRIGIPWDLDFPV

SEQ ID NO: 3673 - protein, 336 aa, Zea mays
MDLRFPPPAPSSCFGGGGVLPARGHHRRAQSETFIRLPDADLLLDPDADFGFSDIDFPSLSDDSPAASDPTPQPQAPPPQQPLPQAASPASAAPPRPPSGAHMRSLSLDAAFFDGLSLQGGGGVAGHKRSGSMDGATSPFEGESAPTSVLPDYAKKAVPDDRLAELALLDPKRAKRILANRQSAARSKERKIKYTSELERKVQTLQTEATTLSAQLTLLQRDTSGLTTENRELKLRLQAMEEQAKLRDALNDALREEVQRLKIATGQVPNINGNPFNGGLPRLPQQQQQQVPSYFSQPQGMQYFSSHQGQHQHPNHHPQSSSNGGGQSLSDSMDFM

SEQ ID NO: 3674 - protein, 171 aa, Glycine max
KKLRLSKDQSIVLEESFKEHNTLNPKQKLALAKQLGLRARQVEVWFQNRRARTKLKQTEVDCEFLKRCCENLTEENRRLQKEVQELRALKLSPQFYMHMTPPTTLTMCPSCERVAFPPPLPLILPRVTITCLHLTPGPFPLAHGQALRCPPSQILDSRKQNDKIEKKDRKP

SEQ ID NO: 3675 - protein, 164 aa, Glycine max
ICVVGLGAIARCAWLRRGPVPGSGSGAEESPATRTKGLKKKVVNSLPKFTYAGGGDRCKWSECAICLTEFGAGDEIRVLPQCGHGFHVACVDTWLASHSSCPSCRAPFAVTARCHKCGHFPAVSAAAASESKAVGGDNAADSTANANRNNVIITNGFSNYGFLP

SEQ ID NO: 3676 - protein, 199 aa, Ashbya gossypii ATCC 10895
MVISHNGKIHYEASTSEYHKGSGVYHHKATIMASPQTSKHHWSHSSSIDLTTLTPAQLAQVKQQFDQELQHFTKSLQALSMARAKFNECIADVKVVSEKKNSEQRLLVPLAGSLYVPGKVVNNQKFMVDIGTGYYVEKDASQAIEFYQKKVNKLNKEAVQIQDIIKEKTQSSLAIEAQMRKAAIKQHEEIAKQKQQAAQ

SEQ ID NO: 3677 - protein, 295 aa, Glycine max
  misc_feature (262)..(262): Xaa can be any naturally occurring amino acid
MDVRKRGRPDVNLNGAVKKTKQELESLSSGVGSKSKPCTKFFSTAGCPFGEGCHFLHYVPGGYNVVAHMMNLKPAAPPPRTVAAPPPIPNGSAPSAVKTRICNKFNTAEGCKFGDKCHFAHGEWELGKPIAPSIDDHHHHRPLGPPAGGRMAGRIEPPPAMAGSFGAISTAKISVEASLAGAIIGKGGVNSKQICRQTGAKLSIREHESDPNLRNIELEGTFEQIKEASNMVKDLLLTVSMSAPPKSTPGVPGAPAPPGSNXKTKLCENFAKGSCTFGERCHFAHGAAELRKSGV

SEQ ID NO: 3678 - protein, 263 aa, Aspergillus niger
MEQTAQTPGTQQGRQQPVYDTRNGGHYGASAALSAQGYAPVAELYTGTWANVNQGLQGTARDILTTYWQHIINHLESDNHDYKIHQLPLARIKKVMKADPEVKMISAEAPILFAKGCDIFITELTMRAWTHAEDNKRRTLQRSDIAAALSKSDMFDFLIVIVPREEATSHAKRTSQTAGASAGVPGPAGATGQLPPSQHGVPHHMPPPDYSTLGQHGLQDQEYRPPTMYAGAVQSDPAAAYGQHQPQMFEGMYAAYPHLPPQQ

SEQ ID NO: 3679 - protein, 193 aa, Triticum aestivum
MRNGSTVCDAAAAVGLGVAPRYRGVRKRPWGRFAAEIRDPAKRARVWLGTYDSAEAAARAYDVAARTLRGPLATTNFPHDLVSFPTLPALPRPSPPASPGPACSASSTVESYSGPRAANAPRAVPRAPGPTPLLAKLPGGDAGCQSDCASSASVVDDAGDEAASAVVRARAPFVFNLNLPPPSDELCTELRLF

SEQ ID NO: 3680 - protein, 253 aa, Oryza sativa (japonica cultivar-group)
MGRGKVQLKRIENKINRQVTFSKRRSGLLKKANEISVLCDAEVALIIFSTKGKLYEYATDSCMDKILERYERYSYAEKVLISAESDTQGNWCHEYRKLKAKVETIQKCQKHLMGEDLESLNLKELQQLEQQLENSLKHIRSRKSQLMLESINELQRKEKSLQEENKVLQKENPCSFLQLVEKQKVQKQQVQWDQTQPQTSSSSSSFMMREALPTTNISNYPAAAGERIEDVAAGQPQHVRIGLPPWMLSHING

SEQ ID NO: 3681 - protein, 247 aa, Zea mays
MEKEEGFGKSWLGLGIGGGGRDLNLMKRSRPLRPVRLDLLFPPSVEGGEAAARSRKAGAGALRNMSLKQVAGDDDGGQSSHGGPSPSDDDDGAGARKKLRLTTEQSKLLEDTFRAHNILSHAQKHEVARQVDLSARQVEVWFQNRRARTKLKQTEVDCETLRRWRESLADENLRLRLELEQLQRWATAAAGQSSASPSPATATASVCPSCDKVVVVTVTSCGETSGKSSTSSYSSSPPLDMLDRSVQ

SEQ ID NO: 3682 - protein, 218 aa, Brassica napus
  misc_feature (212)..(212): Xaa can be any naturally occurring amino acid
CVTPLPEANSPDEFAGGALEDWPDRAFAVPPRIIQGTIPEINAEKFKEDNEVWKERIAYYKQILPELSRGRFRNIMDMNAYLGGFAAAIVKYPSWVMNVVPVDAEKQTLGAIYERGFIGTYQDWCEAFSTYPRTYDLIHAGGLFSMYENRCDVTLILLEMDRILRPEGTVVFRDTVEMLTKIQSITNGMKWTSRIMDHEKGPFIPEKILLAXKSYWTG

SEQ ID NO: 3683 - protein, 198 aa, Zea mays
PRGGKSPGLQDFPRELTSPPPPQYHPATSSTPSSTAAAAALASPYSSSGHHNDPSAFSIPQTPPSFDFSANAKWADSVLLEAARAFSDKDTARAQQILWTLNELSSPYGDTEQKLASYFLQALFNRMTGSGERCYRTMVTAAATEKTCSFESTRKTVLKFQEVSPWATFGHVAANGAILEAVDGEAGIRSPIVGKVRF

SEQ ID NO: 3684 - protein, 278 aa, Arabidopsis thaliana
MGLDDSCNTGLVLGLGLSPTPNNYNHAIKKSSSTVDHRFIRLDPSLTLSLSGESYKIKTGAGAGDQICRQTSSHSGISSFSSGRVKREREISGGDGEEEAEETTERVVCSRVSDDHDDEEGVSARKKLRLTKQQSALLEDNFKLHSTLNPKQKQALARQLNLRPRQVEVWFQNRRARTKLKQTEVDCEFLKKCCETLTDENRRLQKELQDLKALKLSQPFYMHMPAATLTMCPSCERLGGGGVGGDTTAVDEETAKGAFSIVTKPRFYNPFTNPSAAC

SEQ ID NO: 3685 - protein, 284 aa, Brassica napus
MMFEKDDLGLSLGLNLPKKQMNLKSNPSVSLTPSSSSFGLLRRSSLNESFNSSVPYSDSSRVETRTFIRGIDVNQPPSTAEYGDKDAGVSSPNSTVSSSTGKRSEREEDTDPQGSRGISDDEDGDNSRKKLRLSKDQSAILEETFKDHSTLNPKQKQALAKQLGLRARQVEVWFQNRRARTKLKQTEVDCEFLRRCCENLTDENRRLQKEVTELRSLKLSPQFYMHMNPPTTLTMCPSCEHVSVPPPPQVAASGHHQRSLPVNPWAPATRVSHGLTFDAFRPRS

SEQ ID NO: 3686 - protein, 272 aa, Triticum aestivum
  misc_feature (137)..(137): Xaa can be any naturally occurring amino acid
  misc_feature (226)..(226): Xaa can be any naturally occurring amino acid
MIMSDPAMLPPGFRFHPTDEELILHYLRNRAAESPCPVSIIADVDIYKFDPWALPSKASYGDREWYFFTPRDRKYPNGVRPNRAAGSGYWKATGTDKPIRCSATGESVGVKKALVFYKGRPPKGIKTNWIMHEYRLXAAADGHAGNTYRPMKFRNASMRLDDWVLCRIYKKTSPVSPMAVPPLSDHELDEPSGAGACPMSSAGMIMQGGAGGYPLQAAASGTQRMXQIPVISELLNEYSLAQLFDERGHALMARHDQNVAPLWPPNQGPIPC

SEQ ID NO: 3687 - protein, 400 aa, Sesamum indicum
MGDRVFQHRNSSSILNCPSSVMATTSISDNVAGMSICSESMFKPPNGIDPFYSSSGWDPVISQDQSGNFGNSSMVLQNEFANPNYPVLLENQTMGSSSHLVHFPSDSGLVGMVPKIPSFGSGSFSEIVSSFGHSNFAQNNGAGVQNTVKNVEDAQDHRQDSENGVLGASPNGKRKRKNVEVEKQKDQTRDLAELPKEYDEKKNSGPSSRSRQAVKEAKDNSSGAEASKENYIHVRAKRGQATNSHSLAERVRRERISERMRLLQELVPGCNKITGKAVMLDEIINYVQSLQQQVEFLSMKLATVNPELNVDIERLLSKDILHSRGSNATALGIGPGLSSSHPFQGLPQGTLNAFPGTAPQFQSLPQNLWNNELQNILQNGYDSNPSVGSLGPSGLSKMEL

SEQ ID NO: 3688 - protein, 410 aa, Picea abies
  misc_feature (179)..(179): Xaa can be any naturally occurring amino acid
  misc_feature (193)..(193): Xaa can be any naturally occurring amino acid
MSMPKLCDVCQVSNSVLYCRAHTAQLCLVCDVKIHGGSKASLCHERVWVCEVCEQAPAVVTCKADAAALCVSCDTDIHSANPLASRHERAPVIPFYECPNMPNNNTATNANNDNLDCNVLLNEDGGGDDPLKHDYVDDDYDDYDDDENDHNNLLNHQEDDNDAEICCAEEAATASWLIXEANRNNLTNINGGXSEGEDKMVKDKLKFKAYMQSIDFLQDVENYVDLEYLGTTTTITTPTTPTAHMGADSMVPVHTPEVIEHSSTKVSVETARSLDVDAASKCNYVYRTTSLNHCVSSSSIDVGIVPDSNTTTDISTPYHDPRGVFEIPPRVVHPGGHVEVMGREARVLRYREKRKNRRFEKTIRYASRKAYAETRPRIKGRFAKRTEVEVEQIYSSSLLPDQGYGVVPSY

SEQ ID NO: 3689 - protein, 332 aa, Glycine max
MNQKFIGKPPATVDLDRMPERGSHHRRSHSDTSFRFAANFDDLLLFDPSDFDISGLPSPLPLPSPVSAGLVPMSVDSDESGKQPRPAGASAGGHLRSLSVDSDFFDGLGFGVGGDERGAGKGGGGERRVGHHRHSNSMDGSSTTSFEADSAMIMDGVKKAMAPDKLAELALMDPKRAKRILANRQSAARSKERKIRYTSELERKVQTLQTEATNLSAQLTMLQRDTTDLTTENKELKLRLEALEQEAQLREDLNEALKEELQRLRAQSTRLGAIGGNPSFGGIFNQLASQLAMQQLSNSAPHQQTQHQPQVGMPPPPSGQNHPNFMDFNQQK

SEQ ID NO: 3690 - protein, 410 aa, Picea abies
  misc_feature (182)..(183): Xaa can be any naturally occurring amino acid
  misc_feature (208)..(208): Xaa can be any naturally occurring amino acid
  misc_feature (226)..(226): Xaa can be any naturally occurring amino acid
  misc_feature (233)..(233): Xaa can be any naturally occurring amino acid
  misc_feature (235)..(235): Xaa can be any naturally occurring amino acid
  misc_feature (243)..(243): Xaa can be any naturally occurring amino acid
  misc_feature (248)..(248): Xaa can be any naturally occurring amino acid
  misc_feature (282)..(282): Xaa can be any naturally occurring amino acid
MSMPKLCDVCQVSNSVLYCRAHTAQLCLVCDVKIHGGSKASLCHERVWVCEVCEQAPAVVTCKADAAALCVACDTDIHSANPLASRHERAPVIPFYECPNMPNNNTATNANNDNLDCNVLLNEDGGGDDPLKHDYVDDDYDDYDDDENDHNNLLNHQEDDNDAEICCAEEAATASWLIPEAXXNNLTNINGGNSEGEDKMVKDKLKFXAYMQSIDFLQDVENYVDXEYLGTTXTXTTPTTPTXHMGAXSMVPVHTPEVIEHSSTKVSVETARSLDVDAASKXNYVYRTTSLNHCVSSSSIDVGIVPDSNTTTDISTPYHDPRGVFEIPPRVVHPGGHVEVMGREARVLRYREKRKNRRFEKTIRYASRKAYAETRPRIKGRFAKRTEVEVEQIYSSSLLPDQGYGVVPSY

SEQ ID NO: 3691 - protein, 284 aa, Glycine max
MTVQKEDLGLSLSLSFPLLSSSPSSHNPQKPSWNDPIFTSSGEAGSFLRGIDVNRLPSVVDCEEEAGVSSPNSTVSSVSGKRSERETNGEENDTDRACSRGIISDEEDAETSRKKLRLSKDQSIVLEESFKEHNTLNPKQKLALAKQLGLRARQVEVWFQNRRARTKLKQTEVDCEFLKRCCENLTEENRRLQKEVQELRALKLSPQFYMHMTPPTTLTMCPSCERVAVPPSSAVDPATRHHHVPPSHPRAFPIGHGQALRCPPSQILDSRKQNDKIEKKDRKP

SEQ ID NO: 3692 - protein, 597 aa, Medicago truncatula
MDSDDMHDANDVESLDDDFYSGETEDAPMDDYSDDYDDDNNNNNNNDADDDYFDDGADDSAQSRSTEINFAILKESDIRDRQEDDISSVATVLSIPPVAASILLRHYNWNVSNVNDAWFADEDRVRRKVGLLEKPVYENPDAKELTCGICFEAYRPSKIHNASCGHPYCFSCWGGYIGTSINDGPGCLMLRCPDPACGAAVDQDMINLLASAEDKQKYDRYLIRSYIEDNKKTKWCPAPGCEHAVNFDAGGENYDVSCLCSYSFCWNCTEEAHRPVDCGTVSKWILKNSAESENMNWILANSKPCPKCKRPIEKNQGCMHMTCTPPCKFEFCWLCLGAWSDHGERTGGFYACNRYEAAKQEGVYDETEKRREMAKNSLERYTHYYERWASNQSSRQKALADLHQMQTVHMEKLSDTQCQPESQLKFITEAWLQIVECRRVLKWTYAYGYYLAEHEHAKKQFFEYLQGEAESGLERLHQCAEKELQVFLSAEGPSKEFNDFRTKLAGLTSVTKNFFENLVRALENGLCDVDSNGAATSKATSSKNAAGSSKGKSGRGKGTKATVSSRLTDDNEWSCEQCTYANVGSATACAMCNQERQ

SEQ ID NO: 3693 - protein, 345 aa, Glycine max
MASGKLYAGSNMSLLLQNERLPCSSEVLESLWAQTSNPASFQGSKPVVDFENVSGSRMTDRPFFQALEKEENCDEDYEGCFHQPGKKRRLTSEQVQFLERNFEVENKLEPERKVQLAKELGLQPRQVAIWFQNRRARFKTKQLEKDYGVLKASYDRLKGDYESLVQENDKLKAEVNSLESKLILRDKEKEENSDDKSSPDDAVNSSPHNNKEPIMDLLISKNATTSENGTEVSTLPLPIMVTCKQEDANSAKSDVLDSDSPHCTDYGNHPSSFVEPADSSHAFEPEDHSEDFSQDEEDNLSENFLTLPSSCCLPKVEEPCYDDPPENSCNFGFHVEDQTFCFWPY

SEQ ID NO: 3694 - protein, 301 aa, Oryza sativa (japonica cultivar-group)
MGMEAECDRIKGPWSPEEDEALRRLVERHGARNWTAIGRGIPGRSGKSCRLRWCNQLSPQVERRPFTAEEDAAILRAHARLGNRWAAIARLLPGRTDNAVKNHWNSSLKRKLATATDGGEIDRPCKRVSPGPGSPTGSERSELSHGGCGSGSGGGQVFRPVPRPGGFDAISAADVVRPPRRRDDNDDDGDDDPLTSLSLSLSLPGFHHDSARSHFQELPSPSRSPSPPPSPPAASPSAYPFNADLVSAMQEMIRTEVRNYMAGVGLRAGCGPGAVAESFMPQLVDGVMRAAAERVGVVTRQ

SEQ ID NO: 3695 - protein, 268 aa, Arabidopsis thaliana
LRWCNQLSPEVEHRAFSQEEDETIIRAHARFGNKWATISRPLNGRTDNAIKNHWNSTLKRKCSVEGQSCDFGGNGGYDGNLGEEQPLKRTASGGGGVSTGLYMSPGSPSGSGVSEQSSGGAHVFKPTVRSEVTASSSGEDPPTYLSLSLPWTDETVRVNEPVQLNQNTVMDGGYTAELFPVRKEEQVEVEEEEAKGISGGFGGEFMTVVQEMIRTEVRSYMADLQRGNVGGSSSGGGGGGSCMPQSVNSRRVGFRESVVNQIGIGKME

SEQ ID NO: 3696 - protein, 237 aa, Lolium perenne
MCPIKEEMGGESGSPCSGDYYSPSTSSELQQVHSQNQTPWTKRPAGRTKFRETRHPVYRGVRRRGNAGRWVCEVRVPGRRGSRLWVGTFDTAEIAARAHDAAMLALAAGDSCLNFADSAELLAVSASSYRSLDEVRHAVTEAVDEFERHHALGEEDALSGTSASTPSSSSSVTDDETSSSWAADSPFELEVMGDMGRDLYYSSLAQGMLMAPPTAAAALGDYGEANLADVALWSYQS

SEQ ID NO: 3697 - protein, 343 aa, Nicotiana tabacum
MGSNLVDEIDCGSFFDHIDDLIEFPLENEGAGLSSTDCKDFPTIWNDPLPDSDSLFSGSHRNSASDFSAELSVPYEDIVQLEWLSAFVEDSFSGGGLTLGKDNFPLNKETSEAKFQTSSPVSVLESSSSSSSSSCSVEKTVPLSSPCHRGPQRARSKRPRPATFNPAPAIQLISPTSSFTEIPQPFVAPKITSESENFAESPMKKILKPAVAEQKTKKKLKLSFPSSLVKTNQNPVAQTIRKCQHCEITKTPQWRAGPMGPKTLCNACGVRYKSGRLFPEYRPAASPTFVPAIHSNSHKKVIEMRTKVVPDNNATIARTAPPATVTQPEFNPSNEDSVEEENK

SEQ ID NO: 3698 - protein, 1816 aa, Arabidopsis thaliana
  misc_feature (1730)..(1730): Xaa can be any naturally occurring amino acid
  misc_feature (1750)..(1750): Xaa can be any naturally occurring amino acid
  misc_feature (1780)..(1780): Xaa can be any naturally occurring amino acid
MEETEKNKGSISMVEANLPPGFRFHPRDDELVCDYLMRRTVRSLYQPVVLIDVDLNKCEPWDIPQTARVGGKEWYFYSQKDRKYATGYRTNRATATGYWKATGKDRAIQRNGGLVGMRKTLVFYRGRSPKGRKTDWVMHEFRLQGKLLHHSPNSLEGQNRTVLQSGQMHNSVVASASSVSSQPNMVNGISQDTLLLRQEMLNRTYAWLQQRQPSKTDDASKAKLSEVAKRLESAMWRTATSKVVIVLDGNFFWQEDYLDFRSFDVRVESTLKQLLSQRRANPSSSVSTMVQTPGVSHGWGQSYTATPMVDTSKFNSSNNLSDATTETGRLLPTNRMYRGTINNGRQELSAVGQMIPTPGFDNSANADVYQSHRNEEYSGDGGKLLATGSDFGNPSQLQKQRPTGSNDLMGYNLDHQLGGGFRSNIHQNTSGMTSIPLNAGVGMSGNNVHLANVPRSSEGVLSSTHFSTFSQPSQQPVEQLQVSHVNRYSMSNSGTFVSGNLYGVQTSSGSIETAVDMNSMSLNSMRRVDTSFGSQSGLQNNPLLKPHLRHQFENGNFQSSSNSKENLAQVSHRPLERQFNQQAHYGQYHQQELLMNNDAYRQSQPASNLVSQVKNEPRVEYYNEAFQMQAINKVEPSKPQNQYKQNTVKDEYVGAQSAPVSSSQLKMSPSFPPQTHQTQQVSQWKDSSSLSAGVQPVSGLGQWHSSSQNLTPISKNSNEEREHFGVRFHKQHEGTNNSSSVRESTNCLTVAPSGTLDVPHLPVGINVLSKQLNGDCGLSYKNQRRWLLFLLHVRKCNAAEDNCESKYCFTAKTLLKHINCCKAPACAYQYCHQTRQLIHHYKHCGDEACPVCVFVKNFKEKQKEKFTFLQRAEPSSASLNHGPKESFESMRTSSERDSEAPFVVDDLQPSPKRQKVEKPSQFAYPDTQGNPATISAGVSQAHFSMGLQEKDRLPSDVCKPVRSNVPMNADSSDSSRRLVPVSRELEKPVCKDTHMGRHGVKSALDGESLRLSKQEKPKRMNEISAPKEENAEQSLGVVSASNCGKSKIKGVSLIELFTPEQVEEHIRGLRQWVGQSKTKAEKNKAMGLSMSENSCQLCAVERLAFEPTPIYCTPCGARVKRNAMHYTVVAGESRHYVCIPCYNEARANTVSVDGTPVPKSRFEKKKNDEEVEESWVQCDKCQAWQHQICALFNGRRNHGQAEYTCPNCYIQEVEQGERKPVSQNVILGAKSLPASTLSNHLEQRLFKKLKQERQERARLQGKSYEEVPGADSLVIRVVASVDKILEVKPRFLDIFREDNYSSEFPYKSKAILLFQKIEGVEVCLFGMYVQEFGTDSASPNQRRVYLSYLDSVKYFRPDVRTVSGEALRTFVYHEILIGYLDYCKKRGFSSCYIWACPPLKGEDYILYCHPEIQKTPKTDKLREWYLAMLKKASKEKVVVECTNFYDHFFVQSGECRAKVTAARLPYFDGDYWPGAAEDLIDQMSQEEDGKKSNRKLMPKKVISKRALKAVGQLDLSVNASKDLLLMHKLGEIILPMKEDFIMVHLQHCCKHCCTLMVSGNRWVCNQCKNFQICDKCHEVEENRVEKEKHPVNQKEKHVLYPVAIDNIPTEIKDNDDILESEFFDTRQAFLSLCQGNHYQYDTLRRAKHSSMMILYHLHNPTVPAFAMACAICQQELETAQGWRCEVCPDYDVCNACYSKGINHPHSIISRPSATDSVVQNTQTNQIQNAXREVLLHVMTCCTAQCQYPRXCIACKKMWSLFRLHSRNCRDPQCKVPKCRXRAHFSRKQQQADSRRRAAVMEMVRQRAADTTASTPE

SEQ ID NO: 3699 - protein, 197 aa, Hordeum vulgare subsp. vulgare
ECFPGRTDVQCLHRWQKVLNPELIKGPWSKEEDDIIVEMVKKYGPKKWSTIAQALPGRIGKQCRERWHNHLNPGINKDAWTQEEEITLIHAHRMYGNKWAELTKFLPGKTDNSIKNHWNSSVKKKIGSYMSSGLLAQVSRLPLVEHHAHFSSSPAITQQNSEDSESNAVREVEDSSGCSQSSLGIVSSRKCRHASLG

SEQ ID NO: 3700 - protein, 326 aa, Nicotiana tabacum
MELIEARALKSSFLSDMAMKTSQQVFLDDIWCVAGINNVPSDDFSVDDLLDFSDKDFKDGQSLQELHEDDEKDSFSGSSQHRNSQVSNFSCMDSFSGELPVPVDELENLEWLSQFVDDSTSEFSLLCPAGSFKDKTGGFQVSRSEPVVRPVVQKLKVPCFPLPVVQKPRTYRSRPAGRKWSFSSPTVSADSCSPTSSSYGSSPFPSVLFSNPVLDGDLFCSVEKPPLKKPKKLSTAETGSGRRCTHCQVQKTPQWRAGPLGPKTLCNACGVRYKSGRLFPEYRPACSPTFSQEVHSNSHRKVLEMRRKKESGEVVDSGLATMISTC

SEQ ID NO: 3701 - protein, 92 aa, Malus x domestica
AEDLFSDVWAWRKYGQKPIKGSPHPRSYYRCSSSKGCSARKQVERSCSNPETFIITYTAEHNHVHPTRRNSLAGSTRSKFPSSRNKDKCSSS

SEQ ID NO: 3702 - protein, 370 aa, Zea mays
MKERQRWRPEEDAVLRAYVRQYGPREWHLVSQRMNVALDRDAKSCLERWKNYLRPGIKKGSLTEEEQRLVIRLQAKHGNKWKKIAAEVPGRTAKRLGKWWEVFKEKQQRELRDSRRPPPEPSPDERGRYEWLLENFAEKLVGERPQQAAAAPSPLLMAAPVLPPWLSSNAGPAAAAAAAVAHPPPRPPSPSVTLSLASAAVAPGPPAPAPWMPDRAAADAAPYGFPSPSQHGGAAPPGMAVVDGQALAELAECCRELEEGRRAWAAHRREAAWRLKRVEQQLEMEREMRRREVWEEFEAKMRTMRLEQAAAAERVERDHREKVAELRRDAQVKEEKMAEQWAAKHARVAKFVEQMGGCSRSWSSATDMNC

SEQ ID NO: 3703 - protein, 216 aa, Oryza sativa (japonica cultivar-group)
CGAFPWDASPSCSNPSVEVSSYVNTTSYVLKEPGSNKRVRSGSCGRPTSKASREKIRRDKMNDRFLELGTTLEPGKPVKSDKAAILSDATRMVIQLRAEAKQLKDTNESLEDKIKELKAEKDELRDEKQKLKVEKETLEQQVKILTATPAYMPHPTLMPAPYPQAPLAPFHHAQGQAAGQKLMMPFVGYPGYPMWQFMPPSEVDTSKDSEACPPVA

SEQ ID NO: 3704 - protein, 162 aa, Solanum tuberosum
  misc_feature (86)..(86): Xaa can be any naturally occurring amino acid
  misc_feature (160)..(160): Xaa can be any naturally occurring amino acid
IMERLLERYERYSYAERQLNATDIETPGSWTLEHAKLKARLEVLQRNQKHYAGEELDTLSMKELQNLEHQLDSALKHIRSRKTQLXHESHFCDAKEEALQEQNNNLSKQVKEREKEMAQQTPWEQQSHDHLNSSNSFVLPHPFNNLHIGSIPNCRRQRTXEG

SEQ ID NO: 3705 - protein, 411 aa, Zea mays
  misc_feature (23)..(23): Xaa can be any naturally occurring amino acid
MPPPPPPPPGLPSLAPSPPRPPXQPPAEAPQLRVHGAGSGSGVARACRHHAYSRKQKSLGLLCSNFVALYDREDVEVIGLDDAAKRLGVERRRIYDIVNVLESVGILVRRAKNRYTWLGFGGVPAALKELKLSDDEDDEKLGDADEDAESEKLSQPVDNTSDKPDAPSCRLRSDHRKEKSLGLLTQNFVKLFLNMEVGTISLDEAARLLLGEGHADSNMRKFALILICKAAKVRRLYDIANVLSSLNLIEKTQQADTRKPAFRWLGQAKRKQDNNVMVSVPPSMKAMPNKRAFGTDLTNIDNKRGKLDSAAENKVKLMQGAGNIVKTFERQLVQGKRSDFVYGPFHPAGAKKHETDDQTVKQQERKNIQDWENLAVSFRPQYQNQALNDLFGHYVEAWKSWYVDLTQETAS

SEQ ID NO: 3706 - protein, 247 aa, Triticum aestivum
  misc_feature (180)..(180): Xaa can be any naturally occurring amino acid
  misc_feature (201)..(201): Xaa can be any naturally occurring amino acid
GDLSGPRDWGVYDGDFAYADEDAHAASVEHQLLPPQARRHDRLLVLLLIRAPPPRSSCIYTSFSFDFAPRSIDNQRNFFTSPDDMLEEEYYDEQLPEKKRRLTPEQVHLLERSFEEENKLEPERKTELARKLGLQPRQVAVWFQNRRARWKTKTLERDFDRLKASFDALRADHDALLQDXHRLLSQVVTLTEKDADKEAPXGSFGAAVDASEPEQAAAEAEAKTSWPTPRNKARHGGVRVCSTTQFM

SEQ ID NO: 3707 - protein, 174 aa, Oryza sativa
MLGSCAPTTAGPPPDEATTPEPFRSLQIATASAGSAKKKRRPAGTPDPDAEVVSLSPRTLLESDRYVCEICNQGFQRDQNLQMHRRRHKVPWKLLKREAGEAARKRVFVCPEPTCLHHDPSHALGDLVGIKKHFRRKHSGHRQWACARCSKAYAVHSDYKAHLKTCGTRGHSCD

SEQ ID NO: 3708 - protein, 200 aa, Asarum europaeum
GGIFKKAQELTVLCDAQVSLIMFSSTGKYSEYCSPSTTTKQIYDKYQEASGINLWSSHYEKMQNLLNKLNDDNNKLRKEIRQRIGEDLSGLEIEELRGLEQNLESSLKVVRDKKYQVISSQTETKKKKVKNLEQTHKNLGCALAGKDAICAYGIAYNETLDYKSVLGLANDASHIFAFRIQPCQPNLHNAGYGIHDLRLA

SEQ ID NO: 3709 - protein, 476 aa, Oryza sativa (japonica cultivar-group)
MDDLAAASPPHPPPPPPESHVPPPPQTPEKDSCEDTGDMRISEEKPCTDQELDADQMNSSSFNSSSECENQTPSNDEMTGSESKSEAAQTEGGGSSEEKVLKKPDKILPCPRCNSMDTKFCYYNNYNINQPRHFCKSCQRYWTAGGSMRNLPVGAGRRKSKSSTANYRSILITGSNLAAPAGDAPLYQLSIKGDQTATAVKFAPDSPLCNSMASVLKIGEQSKNAKPTSTAQPRNGETQTCPASGTTSDSPRNEPVNGAVSGHQNGIVGHSGVPPMHPIPCFPGPPFVYPWSPAWNGIPAMAPPVCTAPAEPANSSDNGSTASVQWSMPPVMPVPGYFPVIPSSVWPFISPWPNGAWSSPWIQPNCSVSASSPTSTSTCSDNGSPVLGKHSRDSKPQGDDKAEKNLWIPKTLRIDDPDEAAKSSIWTTLGIEPGDRSMFRSFQSKPESREQISGAARVLQANPAALSRSQSFQETT

SEQ ID NO: 3710 - protein, 342 aa, Nicotiana tabacum
MGSNLVDEIDCGSFFDHIDDLIDFPLENESAGLSSTDCKDFPSIWNDPLPDSDSLFSGSHRNSASDFSAELSVPYEDIVQLEWLSTFVEDSFSGGGLTLGKENFPLYKETSEAKFQTSSPVSVLESSSSSSSSSCSVEKTVPLSSPCHRGPQRARSKRPRPATFNPAPVIQLISPTSSFTEIPQPFVARGIASESENFAESPMKKILKPAVAEQKKKKLKLSFPSARVEANQNPVAQTIRKCQHCEMTKTPQWRAGPMGPKTLCNACGVRYKSGRLFPEYRPAASPTFVPSIHSNSHKKVIEMRTKFVPDNNANIARTAPPATVTQPEFNPSNKESVEEENK

SEQ ID NO: 3711 - protein, 225 aa, Cryptococcus neoformans var. neoformans B-3501A
MTGTLRTHPHATLNRLIAIPIVRNEISDKERLANWVSGSIIRKLLVIFQGSKWVNDIPLRMEASADAVHAPTVAGISGNANDGAWSVALSGGYPDDIDLGYAFTYTGCGGRDLKGTKQNPKNLRTAPQTSHQSFDNPLNAALKRSAETRNPVRVIRGFKLQSKYAPPTGYRYDGLYVVEKAWMAKGLTNGLMVCRYAFKRMDDQEPLPERDLDHDDDNDKARPSE

SEQ ID NO: 3712 - protein, 368 aa, Zea mays
MVVKEFGREVVMSMAKVKRGGEALMAAGAGAGDEEQDDAVLPGFRFHPTDEELVTFYLRRKVARKPLSMEIIKEMDIYKHDPWDLPKASTAAGGEKEWYFFCLRGRKYRNSIRPNRVTGSGFWKATGIDRHIYPATANPVESVSVGLKKSLVYYRGSAGKGTKTDWMMHEFRLPPAAASPSPTPTSMQEAEVWTICRIFKRNIAYKRQPQLPAWRQQQQSSSNTGSFESDGGGGGDEYMNRCLPVPATATATAHQIGGMLNGGGVVSATGSSSSSFFRDRESVHGGQQFHFHEQWLSRFPAAPAVEQKPQLLDPSAMAIAFHQNDDQSVATAAAAAASECCKDGYYWDEIARFMEVNDPTVLHDCRYA

SEQ ID NO: 3713 - protein, 237 aa, Lolium perenne
MCPIKEEMGGESGSPCSGDYYSPSTSSELQQVHSQNQTPWTKRPAGRTKFRETRHPVYRGVRRRGNAGRWVCEVRVPGRRGSRLWVGTFDTAEIAARAHDAAMLALAAGDSCLNFADSAELLAVSASSYRSLDEVRHAVTEAVDEFERHHALGEEDALSGTSASTPSSSSSVTDDETSSSWAADSPFELEVMGDMGWDLYYSSLAQGMLMAPPTAAAALGDYGEANLADVALWSYQS

SEQ ID NO: 3714 - protein, 279 aa, Oryza sativa (indica cultivar-group)
MVKVVFAHFTANQAIFEAFHGEDRVHVVDLDILQGYQWPAFLQALAARPGGPPTLRLTGVGHPPAAVRETGRHLASLAASLRVPFEFHAAAADRLERLRPAALHRRVGEALAVNAVNRLHRVPSSHLPPLLSMIRDQAPKIITLVEQEAAHNGPYFLGRFLEALHYYSAIFDSLDATFPAESTARMKVEQCLLAPEIRNVVACEGAERVARHERLERWRRLMEGRGFEAVPLSAAAVGQSQVLLGLYGAGDGYRLTEDSGCLLLGWQDRAIIAASAWRC

SEQ ID NO: 3715 - protein, 438 aa, Pinus radiata
MVLENFGGVGAREASCRIRHELRGIGGWRMSMPKLCDVCQVSSSVIYCRAHTAQLCLVCDAKIHGGSKASLCHERVWVCEVCEQAPAVVTCKADAAALCVACDTDIHSANPLASRHERAPVIPFYECPNMPTNNTVTHANNDNLDCNVLLNEDGGGDDPLKHDYVDDDYGDYDDDENDQNNLLNNQEDNNDAEICCAEEAATASWLIPEANRNNLTIINGGNSEGEDKMVKDKLKFKAYMQSMDFLQDVDNYADLEYLGTTTITTPINPTANMGADSMVPVHTPEVIEHSSTKVSIDTAGSMDVDAASKCNHVYRTTSLNHCVSSSPIDVGIVPDSNITSDISTPYHDPRGVFEIPPRVVHPGGQGEVMGREARVLRYREKRKNRRFEKTIRYASRKAYAETRPRIKGRFAKRTEVEVEQIYSSSLLPDQGYGVVPSY

SEQ ID NO: 3716 - protein, 198 aa, Arabidopsis thaliana
MEQSEEGQQQQQQGVMDYVPPHAYQSGPVNAASHMAFQQAHHFHHHHQQQQQKQLQMFWANQMQEIEHTTDFKNHTLPLARIKKIMKADEDVRMISAEAPVIFAKACEMFILELTLRAWIHTEENKRRTLQKNDIAAAISRTDVDFLVDIIPRDELKEEGLGVTKGTIPSVVGSPPYYYLQQQGMMQHWPQEQHPDES

SEQ ID NO: 3717 - protein, 189 aa, Calycanthus floridus
GGILKKAREITVLCDAEVSLIMFSSTGKFSEYCSPPTTTKKIFDRYQHVSGINLWNSHYEKMQNHLSKLTEDNNRLRREIRQRMGEDLNELEIDELRGLEQNLNDSLKVVRERKYHVINTQTETYKKKLRSLHEIHTNLIHTLEGREVNGHFGFSGNDAPHYGAVINLAHGGNHDLHEIAYGSNDLRLA

SEQ ID NO: 3718 - protein, 116 aa, Oryza sativa
  misc_feature (24)..(24): Xaa can be any naturally occurring amino acid
MEVGGRKRGKPDGANGGGGKRARXTSGCPFGEGCHFLHHFPGGYQAVAKMTNLGGPAIAPPPGRMPMGNAVPDGPPTPTVKTRLCNKYNTAEGCKWGDKCHFAHGERELGKPMLMD

SEQ ID NO: 3719 - protein, 232 aa, Hordeum vulgare subsp. vulgare
MGRGKIEIKRIENATNRQVTYSKRRSGIMKKARELTVLCDAQVAIIMFSSTGKYHEFCSTGTDIKGIFDRYQQAIGTSLWIEQYENMQRTLSHLKDINRNLRTEIRQRMGEDLDALEFEELRGLEQNVDAALKEVRQRKYHVITTQTETYKKKVKHSQEAYKNLQQELGMREDPAYGFVDNPAAGGWDGVAAVAMGGGSAADMYAFRVVPSQPNLHGMAYGGSHDLRHLRLG

SEQ ID NO: 3720 - protein, 202 aa, Calycanthus floridus
GGILKKARELTVLCDAEVSLIMFSSTGKFSEYCSPSSTAKKIFDRYQQVSGINLWNSHYEKMQNHLNKLKEDNNNLRREIRQRMGEDLNDLEIDELRGLEQNLDNSLKVVRERKYHVINTQTETYKKKLRSLHEAHANLLRALEEGNDDNGDYGMGNNGGADYQAAAFGWANEGSQMFALCVQPCHPNLQDARSGHHDLRLA

SEQ ID NO: 3721 - protein, 616 aa, Coprinopsis cinerea okayama7#130
MSSDYEYSDDDAAYYDDEDMLDGTQDDEVSDDDMDMDIGDDFKVSTKGKRKSYEVEHESLSQAAVEKVMRDDAEHTSGILGVELDIAKLLLRHSSWNKEKLIEQYMDNPTKVMVSAGIVLPEVDPQATPTPARTQTSNSSSTRRPTRSTSKLLSSFSSGSRSSKSSSGSPPSSCASPKALKKADEPFVCPICFDDDPKVRTLSLDCEHTFCSGCWTAYITSKIRDEGEHYLRCMAEGCALVTSDTFIRSVLVPEQGSQSITPAEAEENLKVWSRFQELLVRHFVSCNPDLKFCPYPSCTNTVSCPAASSKLSLTSIVPIVSCGARGIGGQEQSQSQSQSSLGGKEHKFCFGCPVESDHRPVICNVAKMWLKKCRDDSETANWIKSNTKECSQCQSTIEKNGGCNHMTCKKCKHEFCWVCMGPWSEHGTAWYSCNRYDEKAGQEARDAQSRSRASLERYLHYYNRWANHEQSAKLSVDLYAKTEKKMEEMQITSALTWIEVQFMKKAVEEVEKCRMTLKWTYAMAYYLAKGNEKELFEDNQRDLEKAVEDLSELLESPLEPENIPTLRQQVTNKTVYVQKRNEIVLEDTANGFLEGRWKWNAKVEGFDDPDPSLIAI

SEQ ID NO: 3722 - protein, 194 aa, Chloranthus spicatus
GGILKKAKELSVLCDAQVSLIMSSSTGKFYEYCSPGTNTKKIFDRYQQASGINLWNSQYEKMQEYFEKLKETNNKLRKEIRQRRGEDLNGLNINELRSLEQNLDDSLKIIRERKYHVIKTQTETYGKKLKHRQEEHEKLLHRLEGIDMNQGYDMLDREGDYETAFGLANGGGHVFAFRLQPIQPNLHDNGYGTH

SEQ ID NO: 3723 - protein, 276 aa, Oryza sativa (indica cultivar-group)
MVDGHLEASTRGFDVNRPPSSGGGGGAEEEQDDVAGAALSSSPNNSAGSFPMDDFSGHGLGGNDAAPGGGGGDRSCSRASDEDDGGSARKKLRLSKEQSAFLEESFKEHSTLNPKQKLALAKQLNLRPRQVEVWFQNRRARTKLKQTEVDCEYLKRCCETLTEENRRLQKELAELRALKTVHPFYMHLPATTLSMCPSCERVASNSAPATASSAATSSTAAPPAAPSSGGIAATSSSSAAAAAAPDHRPSSFAALFSSPRGFPLSVAPQAQPPTSS

SEQ ID NO: 3724 - protein, 333 aa, Craterostigma plantagineum
MNQQQVKVSKNNKQVNNCEDDDDSSDLRRGPWTVDEDFTLINYIAHHGEGRWNSLARFAGLKRTGKSCRLRWLNYLRPDVRRGNITLEEQLLILELHSRWGNRWSKIAQHLPGRTDNEIKNYWRTRVQKHAKQLKCDVNSKQFKDTMRYLWMPRLVERIQASATTDDGAPPAVASSPSSAMNTACYSAAMAAGDHRRQFMLMPQYYATTTTTHNNSMIAQENSSTVASSESFGSLSSELTAEANYANYHRVINGADHQQIDSSTTSYDWQNCAVGNNGNSDQLGMGFADDRRSNEQWMMMTDDVVDNGGSSDQDNNLWNVDDVWFLQQFSSCF

SEQ ID NO: 3725 - protein, 202 aa, Hydrangea macrophylla
NGLFKKANELTVLCDAKVSIIMFSTTNKLHEYISPSISTKELFDLYQTTMGIDLWSSHYERMQENLKKLKDVNRNLRMEIRQRMGESLNDLSWKDLRGLEQEMDSSVKIIRERKYRVLGNQIDTHRKKVRNAEEIHRYIIHEFEVKEEDPHYGLVDNGGNYDSVLGFPNDGPPRIVAFRLQTNQHSLCTGGGSDLTTYALLD

SEQ ID NO: 3726 - protein, 504 aa, Oryza sativa (japonica cultivar-group)
MLGSCAPTTAGPPPDEATTPEPFRSLQIATASAGSAKKKRRPAGTPDPDAEVVSLSPRTLLESDRYVCEICNQGFQRDQNLQMHRRRHKVPWKLLKREAGEAARKRVFVCPEPTCLHHDPSHALGDLVGIKKHFRRKHSGHRQWACARCSKAYAVHSDYKAHLKTCGTRGHSCDCGRVFSRVESFIEHQDTCNASRGQAAAVAEGGNVSTAACGGVAVLEQEKQLDLQAPAAASLSRTASSTSPSSDVVASPVAWPGAGAPSMPSPKAAAFRGRFDMAPSPPPPSYDHYRGGAGAHNLELQLMPPFNAGGAAAAPGGMGACFYAAAHQHHPTGVSQCNDASTQLQLSIGRDEVMGAAGTSDEASAAATAKEQAREQLRQAMAEKEAAGEARAQARRQVELAEQELATARRMRHQAQVELSRAHALRDHAVRQVNATLLQITCFSCRHKFRAAAAGAPLPAAMSSDVACSYVSSVVTEGGDADDPLDVVDATRRRLQHANSMGIM

SEQ ID NO: 3727 - protein, 247 aa, Pisum sativum
MGRGRVELKRVENKINRQVTFAKRRNGLLKKAYELSVLCDAEVALIVFSNRGKLYEFCSTSSMLKTLERYQKCNYGAPEGNVTSKEALVLELSSQQEYLKLKARYESLQRSQRNLMGEDLGPLSSKDLETLERQLDSSLKQIRSTRTQFMLDQLGDLQRKEHLLCEANRALRQRMEGYQINSLQLNLSAEDMGYGRHHQGHTHGDELFQVQPIECEPTLQIGYHQGDPGSVVTAGPSMNNYMGGWLP

SEQ ID NO: 3728 - protein, 201 aa, Hydrangea macrophylla
NGIIKKAQELTVLCDAKVSLIMISTTGKFHEYTSPSTTTKQIYDQYQKTLDIDLWSTHYERMQEHLRKLKEVNNKLRREIRQRLGEDLNDLNLNELRDLEQKSAASTAVIRERKYHVLKTQTETCRKKVRNLEERYGNLFLDWEGKCEDPQYGLVENDGEYDSAVAFANRVPNSYAFGLQPSHPNLHHGGGGYGSHDLRLA

SEQ ID NO: 3729 - protein, 356 aa, Populus tomentosa
MFHTKKPSTMNSHDRPMCVQGDSGLVLTTDPKPRLRWTVELHERFVDAVTQLGGPDKATPKTIMRVMGVKGLTLYHLKSHLQKFRLGKQPLKDFSDHSIKDASALDLQRSAASSSGMMSRSMNEMQMEVQRRLHEQLEVQRHLQLRTEAQGKYIQSLLEKACQTLAGDQNLASGSYKGLGNQGIPGMGAMKEFGSLNFPAFQDLNIYGGDQLDLQHNMDRPSLDGFMANNDNICLGKKRPSPYDGSGKSPLIWPDDLRLQDLGSGPACLEPQDDPFKGDQIQMAPPSMDRGTDLDSISDMYEMKPALQGDGLDEKKFEASAKLKRPSPRRSPLAAERMSPMINTGAMPQGRNSPFG

SEQ ID NO: 3730 - protein, 182 aa, Hordeum vulgare subsp. vulgare
MNRFAFEERARVLLLVSREQAMPVPVAVRGDRAREQAFVCKTCHRVFPSFQALGGHRASHKKPRLDGDGGLKPKMHGCSVCGLEFAVGQALGGHMRRHRAMVAGGHGVTAAAARAETINNLDDSGNAAVVVGSGGGMKRGLWLDLNHPPCDDGDCGHDAAAAGYTFHQFLDAGTMPVDCVGY

SEQ ID NO: 3731 - protein, 309 aa, Arabidopsis thaliana
METEEEMKESSISMVEAKLPPGFRFHPKDDELVCDYLMRRSLHNNHRPPLVLIQVDLNKCEPWDIPMYNTTKRVCVQRDRKYATGLRTNRATATGYWKATGKDRTILRKGKLVGMRKTLVFYQGRAPRGRKTDWVMHEFRLQGSHHPPNHSLSSPKNTEGVICRDNMGSCFDETASASLPPLMDPYINFDQEPSSYLSDDHHYIINEHVPCFSNLSQNQTLNSNLTNSVSELKIPCKNPNPLFTGGSASATLTGLDSFCSSDQMVLRALLSQLTKIDGSLGPKESQSYGEGSSESLLTDIGIPSTVWNC

SEQ ID NO: 3732 - protein, 271 aa, Antirrhinum valentinum
HLPQVSTSLHSRAATSVVDLNGNEIQLHDMLSGHYLTTANAPVLESTALFNNNNNFNHDVVNGLNRDPSPTFPTKQAVKKDRHSGIYTSQGPRDRRVRLSIGIARKFFDLQEMLGFDKPSKTLDWLLTKSKTAIKELVQSKSTKSNSSSPCDDCEEVVSVESENVTDHSKGKSLKANNKSKEAMDSHQAAAKESRAKARARARERTKEKMCIKQLNEAIVLRNHQFEVSGTREAFVHPVFGFHQQNYSNTSHENWDQSNFASQSNQLCAIL

SEQ ID NO: 3733 - protein, 271 aa, Antirrhinum valentinum
HHPQVSTSLHSRAATSVVDLNGNEIQLHDMLSGHYLTTANAPVLESTALFNNNNNFNHDVVNGLNRDPSPTFPTKQAVKKDRHSGIYTSQGPRDRRVRLSIGIARKFFDLQEMLGFDKPSKTLDWLLTKSKTAIKELVQSKSTKSNSSSPCDDCEEVVSVESENVTDHSKGKSLKANNKSKEAMDSHQAAAKESRAKARARARERTKEKMCIKQLNEAIVLRNHQFEVSGTREAFVHPVFGFHQQNYGNTSHENWDQSNFASQSNQLCAIL

SEQ ID NO: 3734 - protein, 199 aa, Oryza sativa (japonica cultivar-group)
MRRGGAAEEDAEAARFRGVRKRPWGRYAAEIRDPAKKARVWLGTYDSAEDAARAYDAAARALRGAKAKTNFPLSLPHAQPQLHHHHHHHLTYPAAAVVAARPATSSLSSTVESFGTRPRPVLPPRPPPPPPIPDGDCRSDCGSSASVVDDDCADAAASPSCRLPFQFDLNLPPGGGGGGGGGFGCAYDDEELRLTALRL

SEQ ID NO: 3735 - protein, 148 aa, Brassica napus
NIDSEVFSWFQNQNQNHCLKFHSSCFPPTSQSALYGSSSMSNTETNTVDEDDVCESYKMRETTKKRKLTPIQLCLLEESFEEDKRLEPDRKLWLAEKLGLQPTQVAVWFQNRRARFKTRQLELDCDSLKASYAKLKTDRDILFRQNQA

SEQ ID NO: 3736 - protein, 269 aa, Oryza sativa (japonica cultivar-group)
EEQMQRTAKELLEQYLKFRQEADDDGDGGDNKKASKKGKKKKKEKDPSKPKQPMSAYFVYTQQRRAALVAEKKNVPEIGRITGEEWKAMSEAEKAPFEAAARKQREEYQVEMAAYRQRKQEEAACQEKEEEEQKKIMKQEALQLLKKKEKTDNIIKKTKEEQRKKKVGGAAAAADPNRPKKPASSFLLFSKEARRQLAEERPGVASSTLTALVSVKWKELGEAEKQAWNGKAAEAMAAYKRDMEEYTKAAASGGGGGDASPCTSSSASS

SEQ ID NO: 3737 - protein, 124 aa, Zea mays
  misc_feature (78)..(78): Xaa can be any naturally occurring amino acid
  misc_feature (92)..(92): Xaa can be any naturally occurring amino acid
MDCAGDACGFEQSNLGKRGRDEPCSSGPTSKACREKMRRDKLNDRFLELSSVMSHGKEAKLDKANILSDAARMVAQLXGEAEKLKESNEKLXENIKDLKEEKNELREEKVRLKVEKDRLEQQVK

SEQ ID NO: 3738 - protein, 230 aa, Sagittaria montevidensis
MGRGKIEIKKIENSTNRQVTYSKRRAGLIKKAEELTVLCDAQINLILISGSRKVHHYCSPSTDIHTVMDRYQQLTDSDLWQPQYEGMQKTLNHLKETNNNLRKQIRQRMGEDLEDLNMNELLALEREMDESITVVRDKKYHVLTTRTDTAKKKWKNGQQRYNSLVQDLVKLEGVEILDYACASIEASDYKPPIAMSIASRPADVGYAFHHSAGQSNVHDVGYGFHELRLA

SEQ ID NO: 3739 - protein, 200 aa, Tacca chantieri
QGIMKKAKELTVLCDAEVSIIMFSSTGKFAEYCSPSTDTKKVYDRYQQVTGIDLWSSQYERMQNNLNHLEEINRNLRREIRQRTGEDLDGLDIKELRGLEQNVDEALRIVRQRKYHVITTQTDTYKKKLKNSHEAHRNLMRELEMRDEHPVYGFVDNDPTNYDSALALANAGSHVYAYRVQPSQPNLHGIGYSSHDLRLA

SEQ ID NO: 3740 - protein, 504 aa, Oryza sativa (indica cultivar-group)
MLGSCAPTTAGPPPDEATTPEPFRSLQIATASAGSAKKKRRPAGTPDPDAEVVSLSPRTLLESDRYVCEICNQGFQRDQNLQMHRRRHKVPWKLLKREAGEAARKRVFVCPEPTCLHHDPSHALGDLVGIKKHFRRKHSGHRQWACARCSKAYAVHSDYKAHLKTCGTRGHSCDCGRVFSRVESFIEHQDTCNASRGQAAAVAEGGNVSTAACGGVAVLEQEKQLDLQAPAAASLSRTASSTSPSSDVVASPVAWPGAWAPSMPSPKAAAFRGRFDMAPSPPPPSYDHYRGGAGAHNLELQLMPPFNAGGAAAAPGGMGACFYAAAHQHHPTGVSQCNDASTQLQLSIGRGEVMGAAGTSDEASAAATAKEQAREQLRQAMAEKEAAGEARAQARRQVELAEQELATARRMRHQAQVELSRAHALRDHAVRQVNATLLQITCFSCRHKFRAAAAGAPLPAAMSSDVACSYVSSVVTEGGDADEPLDVVDATRRRLQHANSMGIM

SEQ ID NO: 3741 - protein, 612 aa, Triticum aestivum
  misc_feature (117)..(117): Xaa can be any naturally occurring amino acid
  misc_feature (143)..(143): Xaa can be any naturally occurring amino acid
  misc_feature (223)..(223): Xaa can be any naturally occurring amino acid
  misc_feature (254)..(254): Xaa can be any naturally occurring amino acid
MCSGPRKPSTPPPVAAAPKDPAAVASLLLELAAADDVVEFRRVVEEEKACLDAAGSWYGPSAVGLGRLAAESRTPAMVAALYGSTAVLAHALSVAPGEACRASGTDGATALHMAAAXGGAANAVAATHLLVAGGGSKEGLSGXGVRAGDFFPGPRGLAKKLSAWWLNSPRGCPPLVPKKSASPPAAMVAAQEPRKEYPPDLTLPGLKSGLFSTDEFRMYRFKXVKPWSRAYSHDWTECPFVHPGENARRRDPRXRYSYSCVPCPEFRKGGSCRKGDGCEYAHGVFECWLHPAQYRTRLCKDEVGCARRICFFAHRRDELRSVNPSAVSVGMMQPVSPRSSPPNGMDMGMLNPAGWPSSPVSRLKTARELDFDLEMLALDQYQQKLFDKVSNNAHSPRASWGAPNGGLGSPHAAGSPARNMPDYTDLLGSMDPAMLSQLHALSLKQAGDMSPYSSMPDTQLHMPTSPMVGANNSFGIDHSMAKAIMTSRASAFAKRSQSFIDRGARAPAARSLMSPATTIGEPSMLTDWGSPSGGGNLDWGSPGGKLDWGVQGDELHKFRKSASFGFRGQSAMPAASPATPAEPDVSWVNSLVKDGHTGDHFPQWLEQEQMVA

SEQ ID NO: 3742 - protein, 295 aa, Oryza sativa (japonica cultivar-group)
MAIIHDTSDQQEDNMRSYMDGGGAAAYEEEEEEVEDDDGGGGGGGGGGGGGLGEKKRRLAAEQVRALERSFEADNKLDPERKARIARDLRLHPRQVAVWFQNRRARWKTKQIERDFAALRSRHDALRLECDALRRDKDALAAEIADLRDRVDGQMSVKLEAVAADEHQPPPPPPPPPLAYNSKVVDGSTDSDSSAVFNEEASPYSGAAIDHHHHQTPASYDTAGFTSFFAPSTTLTSSLSFPSMFHASSHFDGHQELLVGGGGAGAVADADLGGAGFFAGDEHAGGLSWYGAEGW

SEQ ID NO: 3743 - protein, 271 aa, Arabidopsis thaliana
RPTRPYGCEKTTEGAAIKQFLHCNSQATFKLKLERQEILRIFNLMALEALTSPRLASPIPPLFEDSSVFHGVEHWTKGKRSKRSRSDFHHQNLTEEEYLAFCLMLLARDNRQPPPPPAVEKLSYKCSVCDKTFSSYQALGGHKASHRKNLSQTLSGGGDDHSTSSATTTSAVTTGSGKSHVCTICNKSFPSGQALGGHKRCHYEGNNNINTSSVSNSEGAGSTSHVSSSHRGFDLNIPPIPEFSMVNGDDEVMSPMPAKKPRFDFPVKLQL

SEQ ID NO: 3744 - protein, 318 aa, Oryza sativa (indica cultivar-group)
MGAPKQRWTAEEEAALKAGVAKHGTGKWRTILRDPEFTALLRLRSNVDLKDKWRNLSVTAGGYGSRERARVALKGGKRGPKALAEPMDADEKNPDIDDNAIIDAQPLAVVVEPMQLESTPEKEKSVARLDDLILEAIKKLKEPSGSNRTTISSYIEEQYWPPEDFQRLLSTKLKALVATGKLIKVNQKYRIAPSSNSSGGKSIKVYSTGEMNIENNNVRQLSKPQVDAELDKMKSMSKEEAAAFAARAVAEAEAAIAEAEEAARAAEAAEAEADAAKAFLDAVVTTMQNRNHASAIGFQPVKLVKTTLVFCYKAFVDR

SEQ ID NO: 3745 - protein, 167 aa, Zea mays
  misc_feature (156)..(156): Xaa can be any naturally occurring amino acid
MEGCDRIRGPWSPEEDGALRRLVELHGARNWTAIGRGVPGRSGKSCRLRWCNQLSPGVERRPFTAEEDTVIARAHVRIGNRWAAIARLLRGRTDNAVKNHWNCSLKRRLGDLGADGVTEGDLDERPCKRASVTPESTSGSGSGSGSGSDRSDLSHXGAFGLGQVYRP

SEQ ID NO: 3746 - protein, 237 aa, Arabidopsis thaliana
MGLSYSSNPTPLDNDQKKPSPATAVTRPQPPELALRCPRCDSTNTKFCYYNNYSLTQPRYFCKSCRRYWTKGGTLRNIPVGGGCRKNKRSTSSAARSLRTTPEPASHDGKVFSAAGFNGYSNNEHIDLSLAFALLNKQHPGSSSQLGFHSELGSSHQSDMEGMFGTSQQKENATYAFGNGSSGLGDPSRVLWGFPWQMNGESFGMMNIGGGGGHVDQIDSGREMWTNMNYINSGALM

SEQ ID NO: 3747 - protein, 650 aa, Oryza sativa (japonica cultivar-group)
MAPVSLPPGFRFHPTDEELIIYYLKRKINGRQIELEIIPEVDLYKCEPWDLPEKSFLPSKDLEWYFFSPRDRKYPNGSRTNRATKAGYWKATGKDRKVNSQRRAVGMKKTLVYYRGRAPHGSRTDWVMHEYRLDERECETDTGLQDAYALCRVFKKTAPGPKIIEHYGVVHHHVEQPQWMTSSIDRSPTLDVSCDGRGDDFESSSFSFPTETPMDSMHGGFGMQMSAPHEDGKWMQFLSEDAFNATNPFLTNPVSANFSCLPSKVDVALECARLQHRLTLPPLEVEDFPQDVSLDTKIGILRSNPNEVDILQEFLSVATASQELINGSTSSYPEMWLGASTSSASYVNELSSLVEMGGVGTSNHHESARLQVEIADMEVFKDEKKRVENLRGVKLVNNDLGEIVVEGDESNPTEDIIAQYPIKVTADNSGEAGHRMTDPTDVGGIDTAPIFSQSQPDDFAAGFDDVNPNASFDLYEKVDVNHRLFVSRVAAAKTFFHRIEPSKKVSFHSNPAATAVSKATEKFHFPVTTKVSGRVSIFSKFKALIRDKFLMMRPSHSYQRLGSKETTVNELLQIVSLLLAPKQINGCPTEQELVKKKAKEVMKPGWGREGSNKLWLPLSKGKGISSMFLSGKWTFLTSALAISTPAECDH

SEQ ID NO: 3748 - protein, 213 aa, Zea mays
  misc_feature (63)..(63): Xaa can be any naturally occurring amino acid
  misc_feature (127)..(127): Xaa can be any naturally occurring amino acid
  misc_feature (134)..(134): Xaa can be any naturally occurring amino acid
CGIWYLLCNCSRLGIEGIHGDACGFEQSNLGKRGRDEPCSSGPTSKACREKMRRDKLNDRFLXELSSVMSHGKEAKLDKANILSDAARMVAQLRGEAEKLKESNEKLRENIKDLKEEKNELREEKVXGLKVEKXRLEQQVKAMSVAPTGYVPHLPHPASYHPAAFAPFVAPQQAAGNKSAPIPAPFPGMAMWQWLPPTIVDATQDPKLWPPNA

SEQ ID NO: 3749 - protein, 73 aa, Arabidopsis thaliana
QVEVWFQNRRARTKLKQQVEVWFQNRRARTKLKQTEVDCEFLKKCCETLTDENRRLQKELQDLKALKLSQPFS

SEQ ID NO: 3750 - protein, 204 aa, Triticum aestivum
  misc_feature (93)..(93): Xaa can be any naturally occurring amino acid
EEAAPAYILWCKDQWAEIKKSPDADFKEVSNALGAKWKTLSNEEKQPYEERYRQEKEAYLQVVGQEKREAEAMKLLDEEQMRWTAKELLEQYXQERRAALAAEKKSVPEIGKITGEEWKGMTEAQKVPYEEVARKQKEEYQKQMEVYKQKKLEENASLEKEEEEQKKILKQEALQLLRKKEKADNIIKKTKEKRQKKKQQQNAD

SEQ ID NO: 3751 - protein, 355 aa, Oryza sativa
MWAPRAVAQGGAVYRGPGPRGWSTVGPRDRRSGSAGRGGHGRETPRFGRRRGGGEREREWGGFKSNPAHLRARVRAGMAGRAATWGRGVGARRGAEKAAARTVSAAVAVVGLAAGGRGRPDSHAGMYIGYTADAAASSSSSSSSSSSSSSEMLRFDTGWPDETPAPSSVAGRRRSAGGDHRQGRGQTEAAAAFIGVRRRPWGRFAAEIRDSTRNGARVWIGTFDSAEAAAMAYDQAALSARGAAAALNFPVERVRESLHALSLGAAGGSPVLALKRRHSKRKRRKKAELLAAAAATAATANATPQTRRISKSTELTTATTDEQKRFVVELEDLGAEYLEELLWLSEINGGSDPAD

SEQ ID NO: 3752 - protein, 683 aa, Zea mays
MAPVSLPPGFRFHPTDEELIICYLKRKINGRQIELEIIPEVDLYKCEPWDLPEKSFLPSKDLEWYFFSPRDRKYPNGSRTNRATKSGYWKATGKDRKVSSHRRAVGMKKTLVYYRGRAPHGSRTDWVMHEYRLDERECETDTGLQDAYALCRVFKKTAPGPKIIEHYGAVHHPIEQTQWMGSSVERSPTLDLSSDVRGDDFDSSSFSFPTEAPMDSSMHGGLFGMQMSAPHEDSKWMQFLSEDAFNATNPFFTNPASSSFSCLPSKVDVALECARLQHRLSLPPLEVEDFPHDVSLDTKASVLRSSNPNNEVDILQEFLSVASASQELINGTSSSYAAEMWAGAGTSSTSGTHYVNELSSLFEFGVKAKEEADNFYHMDCIGTSAGFSPKPVRVDEPVRLVEIADMEEFKEEKRRVENLRGVRLHNNDDLGEIPTDCCITQYPISDTADISGEAGHLTNPTSAGGLDTAPIFSQSQPDDFAIGFSDDADPNASFDLCERVDVKHGLFVSTVGVPKTFFHHVEPSKKVSFHLNNNPVASDDDVSKATGKSRSPIISVMTTKDSGSSFSVFSKLKALIRDKFLVKKLPSSCQRSLLGSKETAAVSELLQMVVSSLLLTPTEVQGATTERKDFLLVMARVKIETTGGLGRRRPKPAEAFVGLFAGNEHQQRRNPRRRRKSSLVSRL

SEQ ID NO: 3753 - protein, 340 aa, Capsicum annuum
MGHHCCSKQKVKRGLWSPEEDEKLIKHITTHGHSCWSSVPKLAGLQRCGKSCRLRWINYLRPDLKRGCFSEQEERIIIDVHRILGNKWAQIAKHLPGRTDNEVKNFWNSCIKKKLISQGFDPNTHNLLSRAAAAATPPHRNNKKKTNNNHTTSSVFTIETSLSPSSTKELVSMDMIKASLAALSPFPHTNSSTTVLTMPQFQTSWSHLYESACNYYNHVPIKTNIVYQNHSTSTGTFGIINENCMWGVTGFEPHHEFGPSNNIGHEEMQQGAQVQLQEENCLEEVYKVNDLHEFNKHGRIAENVTFDDSSDFDFEFVDSELIPCGIYTNVNSIDQLAWDC

SEQ ID NO: 3754 - protein, 239 aa, Oryza sativa
  misc_feature (192)..(192): Xaa can be any naturally occurring amino acid
MAVEEVLDGAAPMLSSSPAASGEEVGARKPQQRCGGAEGWSKRKRSRRRHRDRAAAPPPHGSEEEHLALSLLMLARGHRDPSPAPQEQHGCSVCGRVFSSYQALGGHKTSHRPRTPPTMAAVVVVDEPAATTASPAASSSNSGSGSGGGGGNKVHECSVCKKTFPTGQALGGHKRCHYEGPIGSGGGAAVAXGRGFDLNLPAVALPDIMTERCLPAAAEEEEVLSPLASFKKPRLMIPA

SEQ ID NO: 3755 - protein, 287 aa, Oryza sativa (japonica cultivar-group)
MAKAAAEMDVGGGEGRRWKRTRGRQRIEMKLIENKEARQVCFSKRREGVFKKASELSVLCGARVAVVFFSPAGRPHCFGHPSVSAVADRFLLGRSPADAAAAAAEEEEGGRARSLNRLEERLKDAFGAAARRRDAFDEAARVAGVWNDADVRRAGLADLVSMLAALQRVQAEASERVHDIIVEEAMTHYTGAAAAAANLIDYLDAGPLVSHSPGSHDTTTKLIGGNAVHAPPLSFPPMIMPPPLPPQFSHGFGYTDLAAGYGYNLDHGHGAAYETEEFHNAAACDFF

SEQ ID NO: 3756 - protein, 253 aa, Vitis labrusca x Vitis vinifera
MVRAPCCDKVGLKKGPWTTQEDQNLTAYVLQHGHGNWRALPKQAGLLRCGKSCRLRWINYLRPDIKRGNFSREEEDTIIELHEKLGNKWSAIAASLPGRTDNEIKNVWHTHLKKRLKKKLATPDSKGHFTPAASACDSDSFNSSGKMSPQPSSSEFSSFTDSSTRTMETHSTGVKNEQMEEYSPESFPEIDESFWSDALSSDNSSMASDFPAVADELQLQTPELACGQISNMMDDGMEFWYDVFIRAGGLQEL

SEQ ID NO: 3757 - protein, 309 aa, Picea glauca
MACDRSALYTSSVIMNTEDNSSAHAIAAMIASSCTPPATFQGTRSISVFETGNERKRPAGNSYSALELSDDIGDEDGSDDCIHLGEKKRRLTLEQVRALEKNFEMANKLEPEKKMQLAKALGLQPRQIAVWFQNRRARWKTKQLEKDFNVLKQDYDALKQDYDNLMEENNNLQAMIERMSSKSQSCNDQKFQANSSKLQKDDQDLQLLMMSATKVDCADKENNNEGPSSIGSEGSSVLDMDSPGTIDSQQNIDSIGFSNVKARDLRLECNFRPKVEENVSQADEPCNYLFYNNLETGPLLWDYNWSSGL

SEQ ID NO: 3758 - protein, 253 aa, Vitis labrusca x Vitis vinifera
MVRAPCCDKVGLKKGPWTTQEDQILTAYVLQHGHGNWRALPKQAGLLRCGKSCRLRWINYLRPDIKRGNFSREEEDTIIELHEKLGNKWSAIAASLPGRTDNEIKNVWHTHLKKRLTKKLATPDSKGHFTAAASTCDSDSFNSSGKMSPQPSSSEFSSFTDSSTRTMETHSTGVKNEQMEEYSPESFPEIDESFWSDALSSDNSSMASDFPAVADELQLQTPELAYGQISNMMDDGMEFWYDVFIRAGGLQEL

SEQ ID NO: 3759 - protein, 350 aa, Zea mays
  misc_feature (291)..(291): Xaa can be any naturally occurring amino acid
MELGLSLGDAAVPDAGRAAPELGLGLGVGIGSNAAGTGRGSKAAGTTGTTGWWAAPATPESAVRLSLVSSLGLQWPPPDGGRDEAPARGFDVNRAPSVAGSALALEDDEEEPGAAALSSSPNDSAGSFPLDLGGPRAHAEGAAARAGGERSSSRASDEDEGASARKKLRLSKEQSAFLEESFKEHSTLNPKQKAALAKQLNLRPRQVEVWFQNRRARTKLKQTEVDCEYLKRCCETLTEENRRLHKELAELRALKTAPPFFMRLPATTLSMCPSCERVASGPSPASTSAPXASSTPPATAATTAISYAAAAAAPVRADHRPSSFAALFAATRSFPLASQPRPPAPASNCL

SEQ ID NO: 3760 - protein, 201 aa, Arabidopsis thaliana
METFEESSDLDVIQKHLFEDLMIPDGFIEDFVFDDTAFVSGLWSLEPFNPVPKLEPSSPVLDPDSYVQEILQMEAESSSSSSTTTSPEVETVSNRKKTKRFEETRHYRGVRRRPWGKFAAEIRDPAKKGSRIWLGTFESDIDAARAYDYAAFKLRGRKAVLNFPLDAGKYDAPVNSCRKRRRTDVPQPQGTTTSTSSSSSN

SEQ ID NO: 3761 - protein, 247 aa, Petunia x hybrida
MVFPNQEFESSSSQRKSGRGKIEIKRIENTTNRQVTFCKRRNGLLKKAYELSVLCDAEVALIVFSSRGRLYEYANNSVRATIDRYKKHHADSTSTGSVSEANTQYYQQEAAKLRRQIRDIQTYNRQIVGEALSSLSPRGLKNLEGKLEKAIGRVRSKKNELLFSEIELMQKREIEMQNANMYLRAKIAEVERATQQMNLMHGGGSEYQQQPMSSTSQPYDARNFLPVNLLEPNPHYSRQDQTALQLV

SEQ ID NO: 3762 - protein, 111 aa, Glycine max
AGSDRKKKKAKIVSGGGGSLNNLKEILEDFMRQQMQIEAQWMVAFEARENERRLKEMEWRQAMEVLENERIMMEERWREREEQRRIREEARAEKRDALITALLNKLERQGM

SEQ ID NO: 3763 - protein, 242 aa, Akebia trifoliata
MGRGRVGLRRIENKINRQVTFAKRRNGLLKKAYELSVLCDAEVALIIFSNRGKLYEFCSSSSMFKTLERYQKCNFGAPEPNVSTREALEHSSHQEYLKLKARVEGLQRSQRNLLGEDLGPLSGKELETLERQLDMSLKQIRSTRTQYMLDQLSDYQRREQMLSEANKALRRRLEEGSQPNPHQWDPNVQVVNFGRQQAPAQGEGFFQHIECEPTLHIGYQPDQITVAAAGPSMNNYMQGWIG

SEQ ID NO: 3764 - protein, 229 aa, Akebia trifoliata
MQKREGDMGRGKIEIKRIENTTNRQVTFCKRRNGLLKKAYELSVLCDAEVALIVFSSRGRLYEFSNSSIKSTIERYKKASADSSNTTSIIEANAHYYQHEATKLRQQIQNLQIANRQLMGDSLSSLTVKELKQLENRLERGLTRIRSKKQEIMFAEIEYMQKREVELQKENMYLRAKIAENENAQQTSMVPAQEFDAIQTFDSRNYFQMNMLEGGAAYSHADQTALHLG

SEQ ID NO: 3765 - protein, 308 aa, Brassica rapa subsp. chinensis
MDCSSSLDISLNLNTNAFDRSFPAKLPKEEEVKVSTSAGVERKWLVKDKSASELREELNRVYSENKKIKEMLETVCEKYYALHHHLEKLQSRKSPGIDHIEQPTKKRKQDPEDFLGFPNGKTENSSSNQDHHHQQYEQKNQLLSCKRPVTDSFNKVKVSTVYFPADFSDTSLTVKDGYQWRKYGQKVTRDNPSARAYFRCSFAPSCPVKKKVQRSAEDSSILVATYEGTHNHLGPNASEGDATSQGGSSTVTLDMVHVGQRLDLEKNERGTMQEVLVQQMASSLTNDSNFTAALAAAITGRLMEQSRT

SEQ ID NO: 3766 - protein, 145 aa, Brassica napus
MAARKLGSLLRQHFFSLFFLFVGCFFFSKGCDLRQKRRKKKLRTVTSGSGLSSSWTYLKRVFLSTTRISKSRNQTHPNGPLTTLTSARSSQNSLVTFVQPDPETRTENGFSDISSSDSPPFLPLRNEIFPCTTCGEIFPKTTLLE

SEQ ID NO: 3767 - protein, 193 aa, Nicotiana tabacum
MAFAGTTQKCMACDKTAYLVDKLTADNRIYHKACFRCHHCKGTLKLGNYNSFEGVLYCRPHFDQLFKQTGSLDKSFEGTPKIVKPQKPIDSGKPQVAKVTSMFGGTREKCFGCKKTVYPTEKVSVNGTPYHKSCFKCSHGGCVISPSNYIAHEGRLYCKHHHIQLIKEKGNLSKLEGDHEMNSTTTTEVTAES

SEQ ID NO: 3768 - protein, 116 aa, Arabidopsis thaliana
LPEKKRRLTTEQVHLLEKSFETENKLEPERKTQLAKKLGLQPRQVAVWFQNRRARWKTKQQVAVWFQNRRARWKTKQLERDYDLLKSTYDQLLSNYDSIVMDNDKLRSEVTSLTEK

SEQ ID NO: 3769 - protein, 191 aa, Nicotiana tabacum
MTFAGTTQKCSACEKTVYLVDRLAADNRIYHKACFRCYHCKSTLKLSNFNSFEGVIYCRPHFDQLFKRTGSLDKSFEGTPKVTKPEKPVDNENGSGSKVSSLFAGTREKCVGCTKTVYPIEKVSVNGTAYHKACFKCSHGGCTISPSNYIAHEGRLYCKHHHIQLFKEKGNYSQLESDHETDPALSTQSLT

SEQ ID NO: 3770 - protein, 298 aa, Triticum aestivum
MGAEAKCDRIKGPWSPEEDEALRRLVERHGARNWTAIGRGIPGRSGKSCRLRWCNQLSPQVERRPFTAEEDAAILRAHARLGNRWAAIARLLPGRTDNAVKNHWNSSLKRKLATATGGGAAWEEASDSGDSPRPCKRASPGPESPTGSDRSELSHGSGQVFRPVPRPGGFDAISADVRPPPPRQDEDPITSLSLSLPGLEHGFHHDSARSHFQELSPSPRSPSPPPAPAPQPSSSYPFSGDLVAAMQEMIRAEVCKYMSGVGLPAGCGAGPVGEACIPQLVEGVMRAPAERVGVMTRQ

SEQ ID NO: 3771 - protein, 243 aa, Citrus sinensis
MGRGRVQLKRIENKINRQVTFSKRRAGFLKKAHEISVLCDAEVAVIIFSHKGKLFEYSTGSCMEKILERYERYAYAERQLIAPDPESQRNWPLECNNLKAKIDLLQKDQRHYLGEDLESLSLKDIQQLEQQLDTALKHIRSRKNQLMQESISELQKKEKSIEEQNNLLVKQIKEREKAAAQQAQWGNQIQNQVPNTLSFLLPQPPPCLRLGGAYQEQASEMRRNELNLTLEPVCSCSLGCFAG

SEQ ID NO: 3772 - protein, 224 aa, Hieracium piloselloides
MARGKIQIKKIENSTNRQVTYSKRRNGLFKKASELTVLCDAKVSIIMVSCTDKLHEYISPSTTTKQFFDQYQKAAGIDLWNSHYEKMQEELRQLKEVNKNLRRQIRQRLGDCLEHLGFEKLLDLEKESQEAVYIIRERKLKVIGNKLETSKKKVRSAQDVYKKLMHEFGIRGEDPQFGMIEDGEYDAVYGYPPQMSAPRILTFRLHPNNLHATASDLTTYALLG

SEQ ID NO: 3773 - protein, 174 aa, Helianthus annuus
MTLEDFLVKAGVVAESSPGKVNEEGNLEPQETQWIGYQSHAVQQQNMIMAGHYQVQPSVTVPGNSLMDVGYMSPTSLMGSLSDRHMSGRKRFASGDVMEKTVERRQKRMIKNRESAARSRARKQAYTHELENKVSRLEEENERLRREKEVEKVIPWVPPPKPKYQLRRTSSAPF

SEQ ID NO: 3774 - protein, 252 aa, Saccharum officinarum
MGRSPCCEKAHTNKGAWTKEEDERLVAYIRAHGEGCWRPLPKAAGLLRCGKSCRLRWMNYLRPDLKRGNFTDDEDELIIRLHSLLGNKWSLIAGQLPGRTDNEIKNYWNTHIKRKLLARGIDPQTHRALGADAATAPGVAAHHRATAAALLHHAGAAVVVVPAPVKLAAVKPAPAESSSDDGGSSSGSSSGGGAGEPRCPDLNLDLSVGPPAVVADTPTLHLAVCLGYRLCLRPGRFAVTMLKLYCVSIWFY

SEQ ID NO: 3775 - protein, 101 aa, Brassica napus
  misc_feature (70)..(70): Xaa can be any naturally occurring amino acid
YLFRVWLLFQNGSLMDGSFNGTAMQVVWPHQVTETEQSYHHRQLQQPQQWPFDGLNQRAWGKEEDQDHGXNDHNSLMVGSANLHPYQVKMYANLHPDQVKM

SEQ ID NO: 3776 - protein, 236 aa, Brassica napus
MATVANPAPAKKSRNSRKALKQKNEMVESPLLSPAKGKETKSYEKDLMEMQAMLEKMKIEKEKTEDLLKEKDEILRKKEEELETRDVEQEKLKVELKKLQKMKEFKPNMTLAFCQSLAQTEDDKKGKKKKKDCPETKRPSTPYILWCKDNWNEVKKENPDSDFKETSNILGAKWKTLSVVEKKPYEEKYKADKEAYLQVITKEKREREAMKLLEDEQKQKTAMELLDQYLHFVQEA

SEQ ID NO: 3777 - protein, 422 aa, Populus deltoides
MPRFTSLILSSPLVFFLQVSLILATNAHSLSYIAKDSIIEIGIGREREEVMLKEESGGSGGVVNNWARVCDTCRAAACTVYCRADSAYLCAGCDARVHAANRVASRHERVRVCEACERAPAALLCKADAASLCTACDADIHSANPLARRHQRVPILPISGYLYGTQVGPAAGETEDQFMTQEGEETIGEEDEDEAASWLLLNPAKNSNNQNNNGFLFGGEVDEYLDIVEYNSCAENQYSDQYNQQHYSVPPKSCGGDSVVPIQYGEGKDHQQQQQQQYHNFQLGLEYEPAKAAYSYDGSVSQGVSMSSMDVGVVPESAMSEISISHQSASRGTIDLFSSPPIQMPSQLSPMEREARVLRYREKKKARKFEKTIRYASRKAYAETRPRIKGRFAKRTDVDVEVDQMFSSTLMAETAYGIVPSF

SEQ ID NO: 3778 - protein, 228 aa, Hieracium piloselloides
MARGKIQIKKIENSTNRQVTYSKRRNGLFKKASELTVLCDAKVSIIMVSCTDKLHEYISPSTTTKQFFDQYQKAAGIDLWNSHYEKMQEELRQLKEVNKNLRRQIRQRLGDCLEHLGFEKLLDLEKESQEAVYIIRERKLKVIGNKLETSKKKVRSAQDVYKKLMHEFGIRGEDPQFGMIEDGEYDAVYGYPPQMSAPRILTFRLQPNNHPNNLHATASDLTTYALLG

SEQ ID NO: 3779 - protein, 210 aa, Oryza sativa (japonica cultivar-group)
MVRSRGRPSLGRQRIEIRRIDNSGRRQVTFSKRRNGLFKKASELSTLCGASVAVVAFSSAGNVFAFGQPTVDAVVRRFDPLHADGADPAPAAVEDGGGGGDDVVVADPEELDALRRAEEQTKAQVAAEQARMRDVGDKVTQAMAGRALWWEADVEALGEAELPEFVRALERLRDSVHRHASTLASTATPLPPPPEQEEEVPELDVSDYSF

SEQ ID NO: 3780 - protein, 372 aa, Populus deltoides
MLKQESSGSGGGDNRARLCDTCRAAACTVYCRADSAYLCAGCDARVHAANRVASRHERVWVCESCERAPAALLCKADAASLCTACDADIHSANPLARRHQRVPILPISGCLHGSQVGPAAGETEDRFTTQEGEETISEEEEEEEDEAASWLLLNPVKNSKNQNNNGFLFEGEVDEYLDLVEYNSCTENQCSDQYNQQHYCVPPKSYGGDRVVPIQYGEGKDHQQQRQYHNFQLGLEYEPSKAAYSYNGLISQSVSMSSMDVGVVPESTMSEISISQHRTPKRTIELFSSTAIQMPSQLSPMDREARVLRYREKKKTRKFEKTIRYASRKAYAETRPRVKGRFAKRKDVEVEDDRTFSSTLMAGTGCGIVPSF

SEQ ID NO: 3781 - protein, 334 aa, Medicago truncatula
MSDMKDRQRWRAEEDALLRAYVKQYGPREWNLVSQRMNTPLNRDAKSCLERWKNYLKPGIKKGSLTEEEQRLVISLQATHGNKWKKIAAQVPGRTAKRLGKWWEVFKEKQQRETKGSINRTVDPINDSKYEHILESFAEKLVKERPSPSFVMAASNSSYLHTDAQAPTPGLLPSWLSNSNNAAPVRPNSPSVTLSLSPSTVAAPPPWMQPVRGPDNAPLVLGNVAPHGAVLSYGESMVMSELVDCCKELEEVHHALAAHKKEAAWRLSRVELQLESEKASRRREKMEEIEAKIKALREEQAVALDRIEGEYREQLAGLRRDAETKEQKLAEQWA

SEQ ID NO: 3782 - protein, 588 aa, Oryza sativa
  misc_feature (420)..(420): Xaa can be any naturally occurring amino acid
MGSDEDELLDDEEYYYYCSDGECSGGGSGSDEDEEFGGRGSDEGCEADEVVSTREQRYVVLTEDDIRERQEEIISRVSAIFSVPRESACVLLRHYKWSISKLSDDWFADEENVRRSVGLPSNVVHVPDCPELTCGICFEGCAANAMSCAGCSHFYCHECWEGYISAAVNDGPGCLVLQCPEPSCDAIVLEDMINSLTKDEDKVKYARFVLWSYIGVNNKIKWCPAPDCTCAVEFLGDGNYDVSCKCKFSFCWNCAEEAHRPVSCDTVSKWILKNSAESENMNWILAYSKPCPKCKRPIEKNQGCMHMTCTPPCKFEFCWLCLGAWSDHGDGTGGFYACNRYQSAKMGGMYDEAEARRERAKNSLERYMHYYERWASNQTSRQKAQADLQKVENEDLTKLSDVVGIPETQLKFIPEAWSQXIECRRVLKWTYAYGYYLHNKAKSDFFVYLQGEAESGLERLHKCAEKDMREFLPTADSTQPSLSLQDFGEFRVKLSGLTSVTRNYFENLVQTLEAGLQDVRATDQSASVSTSSSKKPPTNTKGKSGRSKVARTSQERSGDRWPCDRCTFINPSSTNSCNMCGRNKPRRR

SEQ ID NO: 3783 - protein, 503 aa, Oryza sativa (japonica cultivar-group)
MVEARLPPGFRFHPRDDELVVDYLSGKLRSGDGGAASGGGAAGAGCPTPTLIDVDLNKCEPWDLPEIACIGGKEWYFYNLKDRKYARGQRTNRATESGYWKATGKDREITRKGSLVGMRKTLVFYRGRAPKGERTDWVMHEFRQELDHANHHHHLKVLAHRFRFQFALDCIISHSHASWQLDYMQEGWVLCRVFYKSRTEAVAAPTMESTLPPRYINGGTSRSPLPPLVDSSISFNHGGYEEVLPCFSSSHHQQPSPASMNASAAADDDQDYHHLSEGQRHYSDKKMMRDVQNDQVTTRFDGHLAVKREMSLKKDLSEDEQAAPNADAGGFSILLKYSVSKMTSLMKPIQRNISTLQEFLNQKKEAILEKVEIFTKLLLPSRLGSAVFQLCLEHLIKNHKVGISWDGIWELSDWEVADNEVVLKMVGQCSAPADSKSKDLKRLFDLLRPYYDQEGKDPHLFFEHLKFDFTDVLKTIVTDAKWEWFWKYLLNHVFVMPPTGNTY

SEQ ID NO: 3784 - protein, 185 aa, Oryza sativa (indica cultivar-group)
MGRGKIEIKRIENATNRQVTYSKRRTGIMKKARELTVLCDAQVAIIMFSSTGNIKGIFDRYQQAIGTSLWIEQQRMGEDLDGLEFDELRGLEQNVDAALKEYHVISTQTETYKKKVKHSYEAYKTLQQELGLCEEPAWFVDNTGGGWDGGAGAGAAADMFAFRVVPSQPNLHGMAYGGNHDLRLG

SEQ ID NO: 3785 - protein, 186 aa, Arabidopsis thaliana
MEKVDVYDELVNLKATELRLGLPGTEETVSCGKSNKRVLPEATEKEIESTGKTETASPPKAQIVGWPPVRSYRKNNVQTKKSESEGQGNYVKVSMDGAPYLRKIDLTMYKQYPELMKSLENMFKFSVGEYFEREGYKGSDFVPTYEDKDGDWMLVGDVPWEMFVSSCKRLRIMKGSEVKGLGCGGL

SEQ ID NO: 3786 - protein, 554 aa, Arabidopsis thaliana
MGAPKQKWTQEEESALKSGVIKHGPGKWRTILKDPEFSGVLYLRSNVDLKDKWRNMSVMANGWGSREKSRLAVKRTFSLPKQEENSLALTNSLQSDEENVDATSGLQVSSNPPPRRPNVRLDSLIMEAIATLKEPGGCNKTTIGAYIEDQYHAPPDFKRLLSTKLKYLTSCGKLVKVKRKYRIPNSTPLSSHRRKGLGVFGGKQRTSSLPSPKTDIDEVNFQTRSQIDTEIARMKSMNVHEAAAVAAQAVAEAEAAMAEAEEAAKEAEAAEAEAEVAQAFAEEASKTLKGRNICKMDSLKEATVDETVVVVGGRREVDYGGGDGEAFRNHFGCGKSYCFLMSLPFEILKVWLRQAQESLENVLIDLYKKKHSMENQQRLRDLMAEISVIEPDANKACKKLPNIKCIVEVLLKWLEGMKKKLFKAKSQVGIIFEAKKAYISLDLSQTKKDSSIFRTRVFLKWMSETMDHFDTKQDQLFEQVRHNKYCEISWQEISGHGREETTRILSQVGDAYNQIWVVKPEEKMKLLKNTKGGKYFGWGRGQRWEIYECSVAWP

SEQ ID NO: 3787 - protein, 618 aa, Hordeum vulgare
MKREYQDGGGSGGGGDEMGSSRDKMMVSSSEAGEGEEVDELLAALGYKVRASDMADVAQKLEQLEMAMGMGGPAPDDGFATHLATDTVHYNPTDLSSWVESMLSELNAPPPPLPPAPPQLNASTSSTVTGGGGYFDLPPSVDSSSSTYALRPIISPPVAPADLSADSVRDPKRMRTGGSSTSSSSSSSSSLGGGAARSSVVEAAPPVAAAAAAPALPVVVVDTQEAGIRLVHALLACAEAVQQENLSAAEALVKQIPLLAASQGGAMRKVAAYFGEALARRVFRFRPQPDSSLLDAAFADLLHAHFYESCPYLKFAHFTANQAILEAFAGCRRVHVVDFGIKQGMQWPALLQALALRPGGPPSFRLTGVGPPQPDETDALQQVGWKLAQFAHTIRVDFQYRGLVAATLADLEPFMLQPEGEEDPNEEPEVIAVNSVFEMHRLLAQPGALEKVLGTVRAVRPRIVTVVEQEANHNSGSFLDRFTESLHYYSTMFDSLEGGSSGGPSEVSSGGAAPAAAAGTDQVMSEVYLGRQICNVVACEGTERTERHETLGQWRNRLGNAGFETVHLGSNAYKQASTLLALFAGGDGYKVEEKEGCLTLGWHTRPLIATSAWRLAAP

SEQ ID NO: 3788 - protein, 203 aa, Illicium anisatum
KRIENATNRQVTYSKRRGGILKKARELTVLCDAQVSLIMFSSTGKFSEYCSPSATTKKIFDRYQHVSGINLWNSHYQKMQVELNKLKEENNKLRRKIRQRVGGDLDGLNEKELRGLEQNLVDCAKIVRDRKYHVINNESETFRKKIRNLEERHKELLSAMEGNPPSYLFEDNGTELAGDLGSRNSSSLMFAFRVQQVNQISTT

SEQ ID NO: 3789 - protein, 266 aa, Solanum tuberosum
MSIEALKSPTAAALPPLEEIDDSHNLDSWAKGKRSKRPRIENPPTPDQYLALCLLMLANDDGTGFGKGKGTGSIGVVIEQQQEKKLLKPVFIKEKTEQLFKCSECPKVFTSYQALGGHKASHRIINVPATGDGDNNPSTSTSTSGNISALNPSGRSHVCSVCQKAFPTGQALGGHKRRHYEGKLGGNNRYISGGGCGEGLHSGSVVTTSDGGGASTPVARDFDLNMPASPGCQLDLTIDCGGRSQHPIEQEVESRMPAKKPRLFFD

SEQ ID NO: 3790 - protein, 280 aa, Glycine max
KRASKPHTPTQQQSPFVPQQNKNTASSPCGKKKRILNFPGKPFRMVSRENTNWLFDYGLIDDIPVPDATFGVNSSAFTWPPNALDAPSNVGVDIDGSLGDSDGLKESGSKKRVRSESCAASSSKACREKLRRDRLNDKFVELGSILEPGRPAKTDKTAILIDAVRMVTQLRGEAQKLKDTNQGLQEKIKDLKAEKNELRDQKQRLKAEKEKLEQQLKSLNGQPSFMPPPAAIPAAFAVQGQAHGNKLVPFISYPGVAMWQFMPPAAVDTSQDHVLRPPVA

SEQ ID NO: 3791 - protein, 185 aa, Illicium anisatum
EVSLIMFSNSGKLSEYCTPSTSIKSILDRYQHISGINLWSSHYQKMKSHLNKLQEENERLRKEIRHTKGEDLVGLSFNELRGLEHSIDEYLKVVSEKKIRKIVTQIDTCKKKVRSALEQHKLLLRETETIDQDPQYSLYDSETDFEPALGLGNGHQQLEYHLQPNNHQAEVGDDIGYNFHDLRLG

SEQ ID NO: 3792 - protein, 197 aa, Kadsura japonica
SKRRGGILKKAKELTVLCDAQVSLIMFSSTGKFAEYCSPSTSTKKIFDRYQHVSGINLWNSHYQKMQAELNKLKDQNNNLRRKIRQRMGEDLDGLNAKELRGLEQNLVDCAKIVRDRKNHVINNQSETARKKIRNLEERNREYVSALEGNPTDYVFDDNEAAAESASRNSLMFAFRVQPTQPNLHDVVYGTHDLRLG

SEQ ID NO: 3793 - protein, 272 aa, Oryza sativa (indica cultivar-group)
MKNSSNKRSLVADQWHPSSVCCDHRAALREIAKGQSLVTQLRAIVLPALHSDERCDLAAQMLEGILDCSRKAVSQLQLLLSSPHDDDDHHHVDDKRRVRKIISSSDDDDHCSSKAAEDHNAKPLRQHKRRRFGDSVSLETPVPHYDGHQWRKYGQKHIKNSKHPRSYYRCTYRQEEKCKATKTVQQREDLHHANSYNGDHPIMYTVVYYGQHTCCKGPAALADDHVVVEASQISTDSHCQSPSSSSDLQAAEVHADGWLDRYYEKIYHCSIA

SEQ ID NO: 3794 - protein, 250 aa, Brassica napus
MEGIQNPIHRAVEEVFSDFKGRRAGLLKALTTDGQKFFLQCDPEKENLCLYGLPNETWEVNLPVDEVPPELPEPALGINFARDGMPEKDWITLVAVHSDSWLISVAFYFGARFGFGKNERKRLFQMINELPTIFELITGNAKQSKDQSANHNSSRSKSSGVKPRQSESHTKASKMSPPPREDDESGEDEEDDEQGAVCGACGDNYDDFWICCDACEKWFHGKCVKITPAKAEHIKHYKCPSCSTNKKMKA

SEQ ID NO: 3795 - protein, 630 aa, Cryptococcus neoformans var. neoformans JEC21
MTVTQRKPRVDNAQNDSRPIIEPGIKYTCDFCHVDITHTVRIKCAMKQCEEVDLCPTCFCEGKEGLQHKAWHDYMVVEQNSQPIFTPDWGADEELLLISGLIQNGLGNWAEVAQHVGTRTKEECEQHYLQVYLGVGEHGEDLRVKEKEADEKVDESKRRRREFMPPMDRSFPYDPDEFQQRKKARIEELRKPQALPPSNAAPPVSAPTNHEIGGFMPARLEFEHEVDNDAEMAVKDMEFGLVMQYGGDEQPQAKITRPPDEEEEEDEEGGGEDEKGVEKKGKVKKEKQKEDEKEDKPVSPAIEDPDELEVKLAMMDIYFSKLDKREDAKEIIFDRGLTEYRAIQAQDKKLTKEERELVQRYKPFAKLQTAEDFEVLVEGLIYEQTLRRRIAELQEYRRMGITTAAEADVYDNVKNTRSMEFPTQKPAEVLPSGARINAGQHRFLHGTMATPLPDAKTREPTPRAIPAVGRKPPQPLNLANSASLDLLSSEEQSLCSTLRVLPKPYLTIKELYIRENERRQGLLRRRDARKMLNIDVNKSGRIFDFLVQSGMLVLAYEPQGKGKASLQAAAAAVAHGAANGMTTMDGQSQGKDMLMERKKQGVQNDIFIEARQKYQNKQLALWFLGCKKYA

SEQ ID NO: 3796 - protein, 438 aa, Glycine max
  misc_feature (301)..(301): Xaa can be any naturally occurring amino acid
MGRHSCCYKQKLRKGLWSPEEDEKLLNYITKHGHGCWSSVPKLAGLQRCGKSCRLRWINYLRPDLKRGAFSQQEENSIVELHAVLGNRWSQIAAQLPGRTDNEIKNLWNSCLKKKLRQRGIDPNTHQPLSEIENDKDKPLTADKSNQKASNEVMSLVEPPKPKPIATTATTSMPMDRYPLEVSSTFKISGGNNNNNNSNSTLDRFDSSITSSDMMGMGYFPFQHLNYGPNMGLTTTPNNTPLCFIPSSTSSQMMSELNSTMFHSMFPTHVKPTVSLHSNNNNNPSSISSDGVQNWEAGTIXNNNNASKSNGSSSCSIQLQSGSTNFLDHSSTITWGLQAESATKADKDAHVVVPLQSSEQEDIKWSEYLNNTPFFLGTMSVQHQTTNSLYSSDEVKPETTGFIADESSTSWHHSQHFQPSEIYTKDLQRFSVAFGQTL

SEQ ID NO: 3797 - protein, 157 aa, Nicotiana benthamiana
VRAPCCEKMGLKKGPWTPEEDQILISFIQTNGHGNWRALPKQAGLLRCGKSCRLRWTNYLRPDIKRGNFTKEEEDTIIQLHEMLGNRWSAIAGKLPGRTDNEIKNVWHTHLKKKLKDYKPPQNSKRHSKNHDSKGPTTSRSSNNSDLTTQKHIDSPV

SEQ ID NO: 3798 - protein, 377 aa, Oryza sativa (japonica cultivar-group)
MARQTWELENNIPAAASDPDALDAIYRYDEAAQARVQQEKPWANDPHPFRRAKISALALLKMVVHARAGGTIEVMGLMQGKCEGDAIVVMDAFALPVEGTETRVNAQADAYEYMVEYSTINKQIGSHHAIDHNVSEVSVFANTLMTDLAGRLENVVGWYHSHPGYGCWLSGIDVSTQMLNQQFQEPFLAVVIDPTRTVSAGKVEIGAFRTYPKDYKPPDEPVSEYQTIPLNKIEDFGVHCKQYYALDITYFKSSLDSHLLDLLWNKYWVNTLSSSPLLGNRDYVAGQIFDLADKLEQAEGQLAHSRYGMLMPSQRKKEQEESPLAKVTRDSSKITAEQVHGLMSQVIKDILFNSVHPSNKASTSAPDSSGPEPMVEA

SEQ ID NO: 3799 - protein, 255 aa, Populus deltoides
MGRGRVQLKRIENNISRQVTFSKRRTGLLKKAHEISVLCDADVAVIVFSTKGKLFEYSTDSSMESILERYERCSYAEQQFVPHGPEHQGSWFLEHPKLRARVELLQRNLRNYTGQDLDPLSYKELHHLEQKIDTALKSVRSRKNQLVHESLAEMQKKEKALQDQNNILVEQVKKKLKALTEQAQWEQQNLGQNSSSFMLPQAQPPLQPSMLSHPPPTLGGSFQIRGFLNGNKDVEVQTQPSTMPHWMLRHVNDRI

SEQ ID NO: 3800 - protein, 221 aa, Brassica napus
  misc_feature (174)..(174): Xaa can be any naturally occurring amino acid
  misc_feature (185)..(185): Xaa can be any naturally occurring amino acid
  misc_feature (211)..(211): Xaa can be any naturally occurring amino acid
MDYSDDDGMLDNESGDDNLYSDDAADSNPGFAEEDMDKDSTFQLSYVVLNEEDIRKHQRNDIEQVSTVLSISQVEAIVLLLHYQWGASRIEDEWFTDEEKVRESVGLLKEPVVDLNDKVNIECGICFDSFLQKDIATVSCGHPYCKTCWTGYITSKINDGPGCLTVQCPEPSCXAVVGQDMINSXVTKEEDRRSIQIFLRSYIESSREINXVPSPGCDTRD

SEQ ID NO: 3801 - protein, 88 aa, Arabidopsis thaliana
  misc_feature (20)..(20): Xaa can be any naturally occurring amino acid
GIPVHGPRWMCCLVFSELGXPEAEVVPGMGRFSGCFCLGSFSSASVMDYHFVAEMHKERVKKIEGRAPHSHLDAVLAGGMGMPQLMCA

SEQ ID NO: 3802 - protein, 922 aa, Petunia x hybrida
MSSESNGSDSQLQPLNNHLPDVQPEGTTVEPDEVLSVIDSLKEKVAFERAHYIKKRVEGNTQKLEDLTKDLYNLATERKSLEVFGADRTVDLLAKRQKDAIDMQNGIDTSHGDDDSNSSEDDGYATSAILLGSSIAVKNAVRPIKLPEVKRIPPYTTWIFLDRNQRMTEDQSVVGRRRIYYDQNGGETLICSDSDEEVLDEEEEKKVFAEPEDYVLRMTIEEVGLSNTVLDLLGKCLSRKPSDVKARYEDLVKEDNAGTSKNQYMESSLDLYLAKDLDAALDSFDNLFCRRCLVFDCRLHGCSQDLIFPAEKQLPWHCSNADMEPCGPNCYSLAKKFESNATVISPQCASHEEKNVLPSDVASNTQLPGRKHVSRRSKSSQGEGAPSNAKAVSESSDSEIRPINDVTSNKCSSSPTKSKSDSKDGSNKRNSKRIAEHVLVASKNKQKKMTALETDSVASGSLGSKGLNLHSISRKENGDVSSPSQKAQCHSAKRSRRKNSPVTDSENSLQGKALDCQLIEATSEKPAINCDGMSRKNEYVGENNCKQEIDGIKSWRPIEKALFEKGLEMFGRSSCLIARNLMNGLKTCWEVFQYMNNSGNKLFSGAGDGMNGIFEGGSNGDGQENMGNEPRRRSKFLRRRGRVRRLKYTWKSAGYHAIRKRISERKDQPCRQFNPCGCQGPCGKECPCIVNATCCEKYCGCPKSCKNRFRGCHCAKSQCRSRQCPCFAAGRECDPDVCRNCWISCGDGTLGIPPQRGDSHECKNMKLLLKQQQKVLLGRSDVSGWGAFLKNSVGKHEYLGEYTGELISHREADKRGKIYDRENSSFLFNLNDQFVLDAHRKGDKLKFANHSPVPNCYAKVMMVAGDHRVGIFANERICAGEELFYDYRYEPDSAPAWARKPEASGPRKDDAAPSSGRARKHT

SEQ ID NO: 3803 - protein, 227 aa, Zea mays
MARGKVQLRRVENPVHRQVTFCKRRAGLLKKARELSVLCDASVGIIVFSAHGKLYDLATTGTMEELIERYKAASAGEATTDGCGRHNRMDPKHETTVLQQEINLLQKGLRYIYGNRANEHMNVDELNALERYLEIWMYNTRSAKMQIMAQEIQALKSKEGMLKAANEILQEKIVEQSSLLDVGMVVADQQNGRFSTVPLVEEVISSNPLTVLSGYSSCRGSEMGYSF

SEQ ID NO: 3804 - protein, 511 aa, Arabidopsis thaliana
MDFSDDDMIDNKSGEENYSYGGGNESDDYNDVVDTIIPSEKSYVILKEEDILKLQRDDIERVSSILSLSQVEVIVLLLHYNWCVSKVEDEWFTDEERIRKAVGLLKEPVVDFNGGEKDKKCRKVNIQCGICFESYTREEIARVSCGHPYCKTCWAGYITTKVNEKYSRYILRSYVEDGKKIKWCPSPGCGYAVEFGGSESSSYDVSCLCSYRFCWNCSEDAHSPVDCDTVSKWIFKNQDESENKNWMLANSKPCPECKRPIEKNDGCNHMTCSAPCGHEFCWICLKAYRRHSGACNRFVVEQAESKRALLQSEIKRYTHYYVRWAENQSSRLKAMRDLEKLQSVQLKELSDNQCTSETQLQFTVDAWLQIIECRRVLKWTYAYGYYLQDLPKRKFFEYLQGEAESGLERLHHCAENELKQFFIKSEDPSDTFNAFRMKLTGLTTVTKTYFENLVKALENGLVDVTHNEFPPDNETKSTQEKYEEYQDYEDDFLETQRLYDEALLSGCYYDG

SEQ ID NO: 3805 - protein, 173 aa, Arabidopsis thaliana
MGRRKIKMEMVQDMNTRQVTFSKRRTGLFKKASELATLCNAKLGIVVFSPGGKPFSYGKPNLDSVAERFMREYDDSDSGDEEKSGNYRPKLKRLSERLDLLNQEVEAEKERGEKSQEKLESAGDERFKESIETLTLDELNEYKDRLQTVHGRIEGQVNHLQASSCLMLLSRKG

SEQ ID NO: 3806 - protein, 206 aa, Cryptomeria japonica
MGRGKIEIKRIESTTNRQVTFSKRRSGLFKKAKEISILCASDVAVIVFNSTGRLFDFASSSMKRILERYRNASGRGVWNNEYEQMLSQFRNLKKENEELQKELSCVTGENVETLAPKQLDYLEENLVLAAKKVRERKTEVLKYERRKTESKVIGLQQKQSILMELLAHAENHEEYGFTVSNSEGQTTPPPAFRVQPSQPNLQGSGH

SEQ ID NO: 3807 - protein, 750 aa, Oryza sativa
MASSSNPSNLPCSSDGVCMLCKVLTTEVEQLRCSTCATPWHTPCLSSIPPLTDVAHWVCPDCSGDVTASYPPSDVVRPESSLLAAIRVIEADPVLSIQEKARRRQELLGHAGDAGAAITEAVGENVEDSESNNPLSMLNKNINCSFCMLLPERPVTTPCGHNFCLKCFRRWIENGKRACVICRAPITQKVAQDLRINLALVQAIRMAKAANNASTTGETTVYHYKENEDKPDRAFTTERAKRAGMANASSGQIFVTIAPDYFGPILEDHDPRRNRGVRVGDHWKDRMEGRQWGAHFPHIAGIAGQSTHGAQSVALSGGYLDDEDHGEWFLYTGSGGRDLSGNKRTSKEQSFDQKFEKLNAALRVSCLNGYPVRVVRSFKEKRSPYAPESGVRYDGIYRIEKCWRKTGVQGTFKVCSDEHGDHPRPLPDIEELKNAIDITERKGNPAWDFDATDGWKWMITPPISRKAVVTGDPRGKKMQGAARHTNNLSMRERLLKEFRCSICRNVMEEPVTTPCAHNFCKKCLLGSYDNLSLTEERSRGGRTLRARKIVKKCPSCPSDIADFVQNPQVNRDIMNVIESLQKEAEKEDHARVSGEGSSAALVDSDDENDTAWENQDDGNLDEGGCNNPEDMITESVDLNSVTNVDNTENKVEVQQPHKRTAGAGKGKGGKRARTSSAPGDADARNVVTSTETLDGIAAENVADLVQIEDCTFTGVERADPNALEVDGKNMIPDFSEAEKVNPKQDQEVLP

SEQ ID NO: 3808 - protein, 305 aa, Petroselinum crispum
MALDLMNNNSYKFRSKMEETAVQEAAAAGLQSVENLIKAISQSNHQTAYLSSSSSSETGDTDYRAVTDVAVNKFKKFISLLDKNRTGHARFRRGPVQEKTGVEMLVNPIQNQIQNHGSDGFQVYRPTAVHPVQPVQPVQIQPVQLVQPVQRLPPVPKKENISTTINFAAPAVAVAAPATSFMSSLTGDTDGSGFQITNMSGFSSGSRPVSSLKRKCSSMNDVSAKCSGSSSGRCHCPKKKKLRVKKVVRMPAISMKTSDIPPDDFSWRKYGQKPIKGSPHPRGYYKCSSVRGCPARKHVERAVDD

SEQ ID NO: 3809 - protein, 232 aa, Zea mays
MVRGKTQMKRIENPTSRQVTFSKRRNGLLKKAFELSVLCDAEVALVVFSPRGKLYEFASGSAQKTIERYRTYTKDNVSNKTVQQDIERVKADADGLSKRLEALEAYKRKLLGERLEDCSIEELHSLEVKLEKSLHCIRGRKTELLEEQVRKLKQKEMSLRKSNEDLREKCKKQPPVPMASAPPRAPAVDNVEDGHREPKDDGMDVETELYIGLPGRDYRSSKDKAAVAVRSG

SEQ ID NO: 3810 - protein, 340 aa, Thellungiella salsuginea
MAVYDHSGDINRTQLDTSRKRKSRSRRDGTTVAERLKIWKEYNDTVEAASTKKRKVPAKGSKKGCMKGKGGPDNGRCSFRGVRQRIWGKWVAEIREPNRGSRLWLGTFPTAEEAASAYDEAAKAMYGPSARLNFPESTVSDVTSTSSQSEVCTIEPSGDVHVKTEDADCESKPFFSDAWTMHHMEENGACGGVEEIMKDVKADANVGVTDKDWLSEYEHKYWSAVLKEREKHKEQAVADTCQQQPLDSLSVSDYGWPDDLAQGHWDSSEMFDVAELLGDLNGDIFTGLNPGNNVVSGLCELEKQQIGLQGLNSDYGLPPLQLEAQDGNELFDLSFLDMAK

SEQ ID NO: 3811 - protein, 214 aa, Helianthus annuus
MKSFTGTTQKCTVCEKTVYLVDKLVANQRVYHKACFRCHHCNSTLKLSNFNSFDGVVYCRHHFDQLFKRTGSLEKSFDGTPKFKPERTFSQETQSANRLSSFFEGTRDKCNACAKIVYPIERVKVDGTAYHRACFKCCHGGCTISPSNYIAHEGRLYCKHHHIQLFKKKGNYSQLEVEETVAAPAESETQNAETQNAETQNADTQNTDTQNAAV

SEQ ID NO: 3812 - protein, 63 aa, Malus x domestica
EQVKALERNFEVENKLEPERKVKLAEELGLQPRQVAVWFQNRRARWKTKQLERDYSILKTDYD

SEQ ID NO: 3813 - protein, 171 aa, Nicotiana benthamiana
DQVYGTSEGEEVGDAETIADGNDERESKRRAIEVQTSEAASSASHRAVAEPRIIVQTTSEVDLLDDGYRWRKYGQKVVKGNPYPRSYYKCTSQGCNVRKHVERAPSDPKSVITTYEGKHNHDVPAARNSSHNTANNSVSQMSPHTPVVDKQDATRRIGFSNNEQQPIALLR

SEQ ID NO: 3814 - protein, 270 aa, Tradescantia fluminensis
MGRSPCCEKAHTNKGAWTKEEDQRLIAYIKVHGEGCWRSLPKSAGLLRCGKSCRLRWINYLRPDLKRGNFTEEEDEVIIKLHALLGNKWSLIAGRLPGRTDNEIKNYWNTHIKRKLISRGIDPQTHRPVNSGAQFTISSANNQANSTKIPVNEALKQSTDSSSSQDMQSSNSVLDVVERCPDLNLDLSINIAYSTDRKPFSSSTEMQITPAATEATTPTSVSPYFQPICLCYRLGFSRTEACSCKAISNSNSQNVFRYYRPLKEEGHQTN

SEQ ID NO: 3815 - protein, 188 aa, Helianthus annuus
MAFAGTTQKCMACDKTVYLVDKLTADNRVFHKACFRCHHCNGTLKLSNYNSFEGVLYCRPHFDQLFKKTGSLDKSFEGTPNIVKQPKTIDGEKPMANKVSSMFVGTKDKCLGCKNTVYPTEKVSVNGTAYHKSCFKCSHGGCTISPSNYIAHEGHLYCRHHHTQLIKEKGNLSQLEGERSARVGETAP

SEQ ID NO: 3816 - protein, 916 aa, Petunia x hybrida
MAASNGSLSVPRSQITDELMFDTPEEATVETDEVLSVIELLKKEVASARADYVKKRAEKNAQKLDDVTKDLFKSSTERRNLVIHGADSVDLLSKRQQDAIDMHNGIDSSNGDNDSNSSEDDGYASSAILLGSSIAVKNAVRPITLPEMRRLPPYTTWVFLDRNQRMTEDQSVVGRRRIYYDQNGGEALICSDSEEEGLEDEEEKKEFVESEDFMLRMAIKQVGLSDTVLDLLAQCLSRKPSELKARYEDIVKEENACVSKNESIEGTVDFFLDKDIDAALDSFDNLFCRRCLVFDCRLHGCSQDLILTAEKQSAWHSPDADKEPCGPNCYRLAIKKESKATLTPPQLAIHGENPVQPSEVANSTQVAGRKHVSRRSKSFQTESASSNAKNISESSDSEIRPIKDITSVKWTVSPSKTKSDCNGDSNKRNNKRIAEPVIAAIKKRQKKMTPMEPDSGNQASKDLNLCSNSHKDVEDVSSSSQRAPRHNGRRSRRKDCAVLSSENSLQGEGSSCQYKEATSQKCGMSSEDTLRKNEFVDENNCKQKIDGDKSWRPLEKALFEKGLEMFGRSSCMIARNLMNGLKTCGEVFQYMNNSEDMLSRVGYGVNGMLEGSSRGDANGIVGNAARRGSKFLRRRGRVRRLKYSWKSAGYHAFRKRISERKDQPCRQYNPCNCQAPCGKECPCIVNGTCCEKYCGCPNCKNRFRGCHCAKSQCRSRQCPCFAADRECDPDVCRNCWISCGDGTLGTPSQRGDNYECRNMKLLLKQQQRVLLGRSDVSGWGAFLKNSVGKHEYLGEYTGEIISHHEADKRGKIYDREDSSFLFNLNDQFVLDAYRKGDKLKFANHSPAPNCYAKVIMVAGDHRVGIFAKERICAGEELFYDYRYEADKAPAWARKPEASGTKKDDAAPSSGRAKKHT

SEQ ID NO: 3817 - protein, 312 aa, Vitis vinifera
MAATRKDADRIKGPWSPEEDDALQKLVQKHGPRNWSLISKSIPGRSGKSCRLRWCNQLSPQVEHRAFTSEEDDTIMRAHARFGNKWATIARLLSGRTDNAIKNHWNSTLKRKCSAITEDGSFGGDYPPHPLKRSVSAGAAAPVSGLYLSPSSPCGSDVSDSSLPVVSSSHVYRPVARTGGIIPPETTSSSNDPPTSLSLSLPGVDSCEVSNRAPEPNHAPPANPIQMIPTMAPLQQIPMHQHNQPATVPATVLSQGEKPFIPFSAELLAVMQEMIRKEVRNYTAGLEQNGVCLQADGIRNAAVKRIGISKIE

SEQ ID NO: 3818 - protein, 213 aa, Ostreococcus tauri
MTTRLIRGTLSAACVCCGTVGGAVVGAIAGAASSRGVVRGAVCGAYAGALTLLETMDLEGDYEGSSEGEVGREANAETGGEWYAVREDASDGSMRIVAMPFTHAMNFTQVLRMLANGEADRGASAVKVAELPSRTFRRSEGGVDAIDGMCAVCLDVFLDGEMVKTLPSCAHEFHEACIDRWLLRRDCCPICRRRASIDVDREQNVDGDSDSSA

SEQ ID NO: 3819 - protein, 313 aa, Triticum aestivum
MSSEGGGTAITGKKRNRAQIQTLVREGSLYNLTLSEVESHLGAPLLSMNLDDFVRSVLPDEKNLPLPNGAGNSGSQSTSAFGLERQGSSITVPLPLSKKTVDEIWRDIQQEEESSDDEKRSSGCDAQMSFGEITLEEFLQRAGIVTGQYQKDAEELIDLVGTGESAHLMTRVQDFPQGTSAIDAYIVRQSIAQPLSVAIPSTMDSIYPDRQMSISSSLELSDLQSPSRKRMSSQDVVYKVADRRQKRMIKNRESAARSRARKQAYTNELECKLSCLEEENKRLKREKELDMLLKSAPPPEPKRHLRRTRSTSF

SEQ ID NO: 3820 - protein, 331 aa, Oryza sativa (indica cultivar-group)
MALIATGATATATAAPVASPAASSMASELMAQGRESAAVLEALLHGASLPPAHGGAHALAAEILRCCDRALAALRAGGDAESSSADTKRKPATAQPSTRRRRRATASGGGAAAAAEPARVEKARTSEDGFLWRKYGQKEIKNSKHPRLYYRCSYKDDHGCTATKQVQQSEEDPSLYVITYFGDHTCSCQTAAAAAMDDDDDDENSQHFVINFGPATASRSGSPPLLYDDGDDGDVWRETAATPPSSRQSRCSPEGDGEESGVKMSKEEPVDSCPAPSAVSSPADVVSCSSPAMEPDLLGCLNWDDDFGDSSFVDADEFMNFDEIDLFQIYS

SEQ ID NO: 3821 - protein, 132 aa, Glycine max
QKSTQDSGAYDAAARTLRGPKAKTNFPPLSPFCYPHPTTDPFFYTGFHDQHHHHNNNNLNNPQRPTSSGMSSTVESFSGPRPPTTTTTTTITTATPFLTATRRYPRTPPLVPEDCHSDCDSSSSVVSTSLAV

SEQ ID NO: 3822 - protein, 284 aa, Zea mays
MSSSISMMEARMPPGFRFHPRDDELVMDYLLQKLSGHGHHAGAAIVVDVDLNKCEPWDLPDSACVGGKEWYFFSLRDRKYATGQRTNRATHSGYWKATGKDRAVVAGGEDAVAVGMRKTLVFYRGRAPRGKKTEWVMHEFRLHPHAAPCLLAAAAPNKEDWVLCRVFYKSRTTSPRPESEDARDGTPSAEPQLPAALPLAPLADTYAAPTVAEKVYCLSGLPELPFRRPVSLGDLLAFEASEKESVTTVMTSVSNNTSSVLELTPNCNWNQENGMSRMWSPLGI

SEQ ID NO: 3823 - protein, 202 aa, Oryza sativa (japonica cultivar-group)
MARGKVQMRRIENPVHRQVTFCKRRMGLLKKAKELSVLCDADIGVIVFSPHGKIYELATNGNMEGLIERYKCNLPEAQVESTEQNIPMVIQQDVLFLRREVDLLQNSLRYMYGEKDINHMNLGELQSLESNLEVWVNNIRSTKMQLMSREIEMLKNKEGILKAANDILQERIIEQTSILDVRGNMMIPQVPFQLTTESNYYF

SEQ ID NO: 3824 - protein, 330 aa, Oryza sativa (indica cultivar-group)
MITMDLMSGYGRVDEQVAIQEAAAAGLRGMEHLILQLSQTGTSERSPAPAPAQEQQQQQQVDCREITDMTVSKFKKVISMLNRTGHARFRRGPVVAQSSGPAASEPAPVRSSPSAVSRPMTLDFTKAASGYGKDAGFSVSGISAASSSFLSSVTGDGSVSNGRGGGSSSLMLPPPPATSCGKPPLSSAAAAMSAGVGHKRKCHDHAHSENIAGGKYGSTGGRCHCSKRRKHRVKRTIRVPAISSKVADIPADDFSWRKYGQKPIKGSPFPRGYYKCSTLRGCPARKHVERDPADPSMLIVTYEGEHRHTPSAAGQDHPPAPPPPLALPLA

SEQ ID NO: 3825 - protein, 235 aa, Agapanthus praecox
MGRGKIEIKRIENTTNRQVTFCKRRNGLLKKAYELSVLCDAEVALIVFSTRGRLYEYSNNSIKSTIERYKKACADSSNSTAVVEVNTQQYYQQEAAKLRHQIQSLQNSNRHLMGDSLSSLSIKELKQLENRLERGITRIRSKKHELLFAEIEYMQKREAELQNDNMYLRAKITDNERAHQVSVVQSGTEYDTLPTFDSRNYYTHVTMLEAAPHFSHHQDHTALHLGYETKADPTE

SEQ ID NO: 3826 - protein, 178 aa, Oryza sativa (japonica cultivar-group)
MARGKVQMRRIENPVHRQVTFCKRRMGLLKKAKELSVLCDADIGVIVFSPHGKIYELATNGNMQGLIERYKNKSNLPEAQAESNEQNIPQVIQQDVLLLRQEVDLLQNSLRYMYGERDISHMNLGELQSLESNLEVWVNNIRSTKMQIMSREIEMLKNKEGILKAANDILQERELVQD

SEQ ID NO: 3827 - protein, 119 aa, Brassica napus
  misc_feature (107)..(107): Xaa can be any naturally occurring amino acid
  misc_feature (109)..(109): Xaa can be any naturally occurring amino acid
MGNQKLKWTGDEEEALRAGIEKHGPGKWKNILRDPEFADQLSNRSNIDLKDKWRNLCVAPATQCSNDKSRTRKVKEEGVTLASLSPTAAAATPPPYANSSSSSPATXLXPRSASSDFSV

SEQ ID NO: 3828 - protein, 291 aa, Brassica napus
  misc_feature (187)..(187): Xaa can be any naturally occurring amino acid
MGAPKQKWTQEEESALRSGVIKHGPGKWRTILKDPDFSEVLFLRSNVDLKDKWRNMSVIANGWGSREKSRLAVKRTHSLPKQEATSLANTSPLQSDEEMADATGTSAPNVRLDSLIMEAISTIKEPGGSNKTSIGTYIEEQYHAPPDFKRLLSAKLKYLTARRQLIKVKRKYRIPDSTALSSHRRNXLGTSSGKQRSLSLPSPKTDRDEVNVQTKAQIDAELARMKTMNAHEAQAAAEQAVEEAEAAMAAAEEAAKEAEAAEAEAEEAQAYVEEALKTVKGRNNCKMMVCT

SEQ ID NO: 3829 - protein, 374 aa, Glycine max
MINSTKETDFPLKQEGLSSSDHEKAKAPSSSSSSQWLKLKDPRIVRVSRAFGGKDRHSKVCTIRGLRDRRVRLSVPTAIHLYDLQDRLGLNQPSKVVDWLLNAAKHEIDELPPLPIPPGNFTLGYPSLVSCNEVSTSREGSGQNTLLWKPKPGEIMVSDHDKANWMNRREGDDDDDNNHNNSNGDKQGSNNNCHGGALVLPNNLLPTRPNHPSFLGLMNTMPSLGYQWEPNSSAADVNVQWQNHGFFNQTDVHSIDVVPFPSTLALSTGNSTSTTTTSQILVCPPPPGATTQPYFPSSHFATMEMNARQINHYQMLSSSSHQNLLANSLNHPSSQQLMSQSGKAPFSLRIRPKLFHSPNSSESHSQKDQDFPSK

SEQ ID NO: 3830 - protein, 302 aa, Zea mays
MGSEADCDRIRGPWSPEEDDALRRLVERHGARNWTAIGREIPGRSGKSCRLRWCNQLSPQVERRPFTAEEDAAIVRAHARLGNRWAAIARLLPGRTDNAVKNHWNCSLKRKLAAASAPAGSSDVDARPTKRVSLSPDSPSGSGSGSGSGSGSDRSDLSHGAGQVYRPVARSGGFEPADCAMSRPLEEEEEEKEDPLTSLSLSLPGTDQRFHHDRAHSQFQELPASPPSPSPPPPPAGPTSAYPFSPVFMEAMQELIRTEVQRYMASVGVRAGCGAAGGADLCMPQLVDGVMRAAAERVGRMQ

SEQ ID NO: 3831 - protein, 357 aa, Oryza sativa (japonica cultivar-group)
MGAYDRPPPVGMWSHEQFKVDNGQATSASTIMEAEMKFENRLEEIPQVVLEEGRNVDQEASKPPDKVLRRLAQNREAARKSRLRKKAYIQQLETSRLKLAQLEQELQRARQQAVYANGSLREPNLGFTGPIDPGALGFEIKYSHWVDEQNRNTGELRNALLQGQTTDQDLELKLLVEAGLDNYNRLFEMKEEAANSDVFYIMSGMWKTPTERFFLWIGGFRPSEVLKNLRPQLEPLTDKQVVEVGGLQQTSMQVEDALSQGMDKLKQTIADSLTAADPFDSPEAYMVHMANAVEQLRSLVQFVTQADHLRQQTLQEMHRILTTRQAARGLLALGDYFQRFRALSSLWAARPRDSGIS

SEQ ID NO: 3832 - protein, 244 aa, Eucalyptus globulus
MGRGRLQLKRIENKINRQITFSKRRAGLLKKAHEISVLCDAEVALIVFSAKGKLFEYSTDSCMERILERYERYSYAEHQVLASETESIGSWTLEHAKLKARLEVLHRNYRHFMGEDLDSLSLKDLQNLEQQLESALKHIRSRKNQLMHESISVLQKKDRALQEQNNLLTKKIKEKERALAQQAQWEQQDHALDSPVVLPHYLPSLDINGSYQARHNGHDDGENLTQPRAGTLLPPWISASQLRL

SEQ ID NO: 3833 - protein, 1483 aa, Cryptococcus neoformans var. neoformans B-3501A
MAPHEKGVNPSESPSGSLKKAPPSGPKALRGFASPSAFRNAGIGNGLLQHRGEDERISFAFPRKGKESLDRNGERPAPMSLESRLGPPVSRFNRPVGGDSLERGNGKGGWDNRDERTSASSSSIHRINKEKIRPRSDFIESSANLYSEDDRNRDRGRYHERDRSRGTNGDRGGGEGHSHREPGRGKEHQNGQGRDRSLYRDHSRERESSRDERDRYSEEYKHQRSKARFSPSPSPERSRLKSSLGRHRSPVSVSSSSSSSARSPPPVQNREPLRYNGSQSKNGEKELSNGLLENSISRSGVSIAVPRKLETKQLVRPSPPHVNLKSTIQDNPSPPTGKYPPSPPSLDILSKPSCNREPLPDQRPPTPPLPENSSPTSPSLESSRFDQNQHLLPDELPLPPLSISFPQKPVSSSSLSRLSSLSAALSRPNPLDKDGTSMPPSFHFREISNRHQRLSPPNNAENQLPETSIIPPPPSETVPEPPWIRPPYIPPPCTKHRPGIGNFFITNLREKVEDKSGKEEKRVDGMEGGKVVQVTDPRLSMTEEQRGRGRGSSKQRAAFYELTYEWDLYSVTPKPPSPPTAVLITGLGPLTTVDQITKFLRPHGRIKEIDSKVDRKTDMQLGICWVKFEGPPLGRPGTAHDVASMAVKVCDGKKISMGGERIRVVLDGRGKRAEQAVKEEMERRYPPKKPSALPSDMKVTPLSGTAMATTSRPPNAPNASTPLIDKQTFDTSAKAPIIRPGVLKPLGQKMYHRPSAPPLVFNNHRFRDESFLNRPFNAGAGMISQQQMGYKILPGKPVQQLASSFTSAPFVRHPRERREDSWTNERGRRLKGESSTRHWRARSLSRSSYSSYSSYSSYSEESEEERPRHPTKVPYPQRKRLATGPSKEDEYKMEDVREAIRENGHPCVFIDAKSLPAAREYESYLRDHFKAFRPTEIIHSHLGWYILFADDTTAYRVQRVLDTTAVQGHRLSLVVHTSSGPRAQTDASEPVTGGVGESKKGNWRYLTITKKSRPMPAVKKSGKSATIRRKVYSPSVSGSDDDDEQVPVMAQNRKRAPSYASSTSPLSEDDRPFARSVQREERDIDKEGKFSLIGKKADVVSVKAAKGPKSKTIRVDSDEVEENQGVPLASIGEVTKAEGKQDDSTVVKLETLLSESISELTKGKKRPTKAKGGKATKKVRLDQEADDAATKIQIDEDIVPQPPKKKKVVKTEVDKLLASGVLMDEEDAYWLGRVLAAQEDGLEPIWSDGEEDLVDEGHPLFHKSGAWRAEGWKKVAQVQKSRYLPQRNRAVVNSEDVGGITTGRTARLAGRDQHRQTAAVAANNTVESDLFAFNQLRIRKKQLRFARSAIEGYGLYAMETIHAGEMVCEYVGDLVRATVADVREQRYLKQGIGSSYLFRIDNDIVCDATFKGSVSRLINHSCDPSANAKIIKVNGQSKIVIYAERTLYPGEEILYDYKFPLESDPALRVPCLCGAATCRGWLN

SEQ ID NO: 3834 - protein, 243 aa, Agapanthus praecox
MGRGRVELKRIENKINRQVTFSKRRNGLLKKAYELSVLCDAEVALIVFSSRGKLYEFGSAGTSKTLERYQRCCYTSQDATIADREKQNWYQEVARLKAKFESLQSAQRHLLGEDLGPLSVKELQQLERQLEASLSQARQRKTQIMFDQMEELRKKEHHLGEINKQLKTKLEAEGENLRAIQGSWESDATNVGGGNVFSMHPSHSSAMECEPTLQIGYHQLVQPEGSLPRNSGGENNFMLGWVL

SEQ ID NO: 3835 - protein, 1810 aa, Helicobacter pylori
MNEENDKLETSKKTQQHSPQDLSNEETTEANHFEDSSKESKESSDHLDNSTETKTNFDEYKSEETQTQMDFGGNETSESSNGSLADKLFKKARKLVDNKKPFTQQKNLDEETQEPNEEDDQENNGYQEETQMDLIDDETSKKTQQHSPQDLSNEETTEANHFEDSSKESKESSDHLNNSTETKTNFDEYKSEETQTQMDFGGNETSESSNGSLADKLFKKARKLVDNKKPFTQQKNLDEETQEPNEEDDQENNGYQEETQMDLIDDETSKKTQQHSPQDLSNEETTEANHFEDSSKESKESSDHLNNSTETKTNFDEYKSEEITDDSNDQEIIKGSKKKYIIGGIVVAVLIVIILFSRSIFHYFMPLEDKSSRFSKDRNLYVNDEIQIRQEYNRLLKERNEKGNMIDKNLFFNDDPNRTLYNYLNIAEIEDKNPLRAFYECISNGGNYEECLKLIKDKKLQDQMKKTLEAYNDCIKNAKTEEERIKCLDLIKDENLKKSLLNQQKVQVALDCLKNAKTDEERNECLKLINDPEIREKFRKELGLQKELQEYKDCIKNAKTEAEKNECLKGLSKEAIERLKQQALDCLKNAKTDEERKECLKNIPQDLQKELLADMSVKAYKDCVSKARNEKEKKECEKLLTPEAKKKLEQQVLDCLKNAKTDEERKKCLKDLPKDLQSDILAKESLKAYKDCVSQAKTEAEKKECEKLLTPEAKKLLEEEAKESVKAYLDCVSQAKTEAEKKECEKLLTPEAKKLLEQQALDCLKNAKTDEERKKCLKDLPKDLQSDILAKESLKAYKDCVSQAKTEAEKKECEKLLTPEAKKLLEEEAKESVKAYLDCVSQAKTEAEKKECEKLLTPEAKKLLEQQALDCLKNAKTDEERKKCLKDLPKDLQKKVLAKESLKAYKDCVSRARNEKEKKECEKLLTPEAKKLLEEAKESLKAYKDCVSRARNEKEKKECEKLLTPEAKKLLEEAKESLKAYKDCVSRARNEKEKKECEKLLTPEAKKLLEQQVLDCLKSAKTEAEKKRCVKDLPKDLQKKVLAKESVKAYLDCISRARNEKEKKECEKLLTPEAKKLLEEAKESLKAYKDCLSQARNEEERRACEKLLTPEARKLLEQEVKKSVKAYLDCVSRARNEKEKKECEKLLTPEARKFLAKQVLNCLEKARNEEERKACLKNIPKDLQKNVLAKESLKAYKDCLSQARNEEERRACEKLLTPEARKLLEQEVKKSVKAYLDCVSRARNEKEKQECEKLLTPEARKFLAKELQQKDKAIKDCLKNADPNDRAAIMKCLDGLSDEEKLKYLQEAREKAVLDCLKTARTDEEKRKCQNLYSDLIQEIQNKRAQSKQNQLSKTERLHQASECLDNLDDPTDQEAIEQCLEGLSDSERALILGIKRQADEVDLIYSDLRNRKTFDNMAAKGYPLLPMDFKNGGDIATINATNVDADKIASDNPIYASIEPDITKQYETEKTIKDKNLEAKLAKALGGNKKDDDKEKSKKSTAEARVESNKIDKDVAETAKNISEIALKNKKEKSGEFVDENGNPIDDKKKTEKQDETSPVKQAFIGKSDPTFVLAQYTPIEITLTSKVDATLTGIVSGVVAKDVWNMNGTMILLDKGTKVYGNYQSVKGGTPIMTRLMIVFTKAITPDGVIIPLANAQAAGMLGEAGVDGYVNNHFMKRIGFAVIASVVNSFLQTAPIIALDKLIGLGKGRSERIPEFNYALGQAINGSMQSSAQMSNQILGQLMNIPPSFYKNEGDSIKILTMDDIDFSGVYDVKITNKSVVDEIIKQSTKTLSREHEEITTSPKGGN

SEQ ID NO: 3836 - protein, 500 aa, Oryza sativa (indica cultivar-group)
MAQFGGFGGWSAMDVAAAAAAALGNVSGAVYHADPAAAVYASLVPGMAVVPGRAPPSAVQIEAARRWKELEKMALRSVNLMVTCAGAIQAGDYAAAAGSLSDAREIFAKMPTTRTGIGRVLTHFADALAERLFPAFPQSAPPPPPPRGEQRELFRGFYEAGPYLKFAHLAANQAILEAFEGCNSVHVIDFALTDGIQWPSLIQALAVRPGGPPFLRITGIGPHAAGNRDELRDVGLRLAEFARSCSVPFAFRGIAADQLDGLRPWMFQVAPGEAVAINSVLQLHRLLVDQDAAAAASFPAPIDGVLDWVASMNPRVFTVVEQEADHNKSSLLERFTNSLFYYASMFDSLEAISRHGGGDGAGNPLAEAYLQGEIADIVSREGSSRVERHEQMPRWVERLRRGGMTQLPLGATSLWQAAMQLREFSGAGFGVQENGGFLTLTWHSQRLYSASAWRATAGKKMTMMASGAADAMEESQNSNTNGGGGGSSGGGHGALNQIMQ

SEQ ID NO: 3837 - protein, 328 aa, Oryza sativa (indica cultivar-group)
MALTMVSLAAIAGKPTAASAQLVAEGRESAARLYALLVGSSALHGPVGLAEQILLCFDRALAKLHGVNLAGAEDDDDAAGNGNGRKRKPGRGRGLTAASAAASSKRMRVSNAGGNGARIERKATMDDKFLWRKYGQKEIKNSKHPRFYYRCSYKDDHGCTATKQVQQSETADDDTASPVYIITYFGEHTCRHGDDAAAMVVDGGEEEDQLSPAQMVISFASSNGGDASVSWPCSGDDAQNNSETSHESSPPEAPAGEEERLRPCTAAGVSDEPIMESTPPAPELLADLKPMDGCLLDGESLFGMDELVYFHELSAALGLLDRDWGAPV

SEQ ID NO: 3838 - protein, 641 aa, Arabidopsis thaliana
MARDIQLPCDGDGVCMRCKSNPPPEESLTCGTCVTPWHVSCLSSPPKTLASTLQWHCPDCSGEIDPLPVSGGATGFESAGSDLVAAIRAIEADESLSTEEKAKMRQRLLSGKGVEEDDEEEKRKKKGKGKNPNLDVLSALGDNLMCSFCMQLPERPVTKPCGHNACLKCFEKWMGQGKRTCGKCRSIIPEKMAKNPRINSSLVAAIRLAKVSKSAAATTSKVFHFISNQDRPDKAFTTERAKKTGKANAASGKIYVTIPPDHFGPIPAENDPVRNQGLLVGESWEDRLECRQWGAHFPHVAGIAGQSTYGAQSVALSGGYKDDEDHGEWFLYTGSGGRDLSGNKRTNKEQSFDQKFEKSNAALKLSCKLGYPVRVVRSHKEKRSAYAPEEGVRYDGVYRIEKCWRKVGVQVCRYLFVRCDNEPAPWTSDENGDRPRPIPNIPELNMATDLFERKETPSWDFDEGEGCWKWMKPPPASKKSVNVLAPEERKNLRKAIKAAHSNTMRARLLKEFKCQICQQVLTLPVTTPCAHNFCKACLEAKFAGKTLVRERSTGGRTLRSRKNVLNCPCCPTDISDFLQNPQVNREVAEVIEKLKTQEEDTAELEDEDEGECSGTTPEEDSEQPKKRIKLDTDATVSATIR

SEQ ID NO: 3839 - protein, 154 aa, Cicer arietinum
IAPTTRHYRSVSMDSFIGKLNFNDESSKLPPSPGLMSPGNSVDGNSAAAFSLEFGNGEFSGPELKKIMANEKLAEIAMADPKRAKRILANRQSAARSKERKMRYISELEHKVQTLQTEATTLSAQLTLLQRDSVGLTNQNSELKFRLQSMEQQA

SEQ ID NO: 3840 - protein, 310 aa, Brassica rapa subsp. pekinensis
MMKRLSSSDSVGGLISLCPTTSTDQPSPRRYGREFQSMLEGYEEEEEEAVTEERGQTGLAEKKRRLSINQVKALEKNFELENKLEPERKVKLALELGLQPRQVAVWFQNRRARWKTKQLEKDYGVLKTQYDSLRHNFDSLRRDNESLLQEIGKLKAKLNGEEEVEKMMKMENNAVTMECDVSVKEEEVSLPEELTDPPSSPPQALEHSDSFNYRSFTDLRDLLSLKAAASSVAAAGSSDSSDSRAVLNEESSSNVTAGPVTVPQGGFLQFVKMEQTEDHDDFLSGEEACGFFSEEQPPSLHWYSTVDQWN

SEQ ID NO: 3841 - protein, 266 aa, Zea mays
MGRGKVQLKRIENKINRQVTFSKRRNGLLKKAHEISVLCDAEVAVIVFSPKGKLYEYATDSRMDKILERYERYSYAEKALISAESESEGNWCHEYRKLKAKIETIQKCHKHLMGEDLESLNPKELQQLEQQLESSLKHIRSRKSHLMAESISELQKKERSLQEENKALQKELAERQKAVASRQQQVQWDQQTHAQAQTSSSSSSFMMRQDQQGLPPPHNICFPPLTMGDRGEELAAAAQQQPLPGQAQPQLRIAGLPPWMLSHLNA

SEQ ID NO: 3842 - protein, 354 aa, Yarrowia lipolytica CLIB122
MASLATFQVENDIVDVDSTPQQGFDRDDLYKYDDVEQKAILAAHPWRTDPSYFRNVLVSSIALVKMAMHARSGGAIEVMGMMTGKILPNTFVVMDCYPLPVEGTETRVNAQQEGIEFMVEYLQGLKDVGRRENIVGWYHSHPGYGCWLSGIDVDTQFQNQQFQEPFLAVVVDPNRTISAGKVEIGAFRTYPKDYKPPKKATKQNQDQSVPLSKAKDYGAHSERYYELDVSFFKSSLDENLLQLLWNKNWAATLSQSTIQLNHDYTSKLMLDLSEKNAQLAIGLGEKTPQSQGRGFREAMSKADNEPHTNLLNYSTKGQWEAVNRSVKDGVQIGSDELQGLMSLEIQRRLFGRAK

SEQ ID NO: 3843 - protein, 283 aa, Glycine max
TSNDMAFFPANFMLQTPHQDDHQPPPSLNSIITSCAPQEYHGGASFLGKRSMSFSGIELGEEANAEEDLSDDGSQAGEKKRRLNMEQVKTLEKSFELGNKLEPERKMQLARALGLQPRQIAIWFQNRRARWKTKQLEKDYDLLKRQYDAIKADNDALQAQNQKLQTEILALKNREPTESINLNKETEGSSSNRSENSSEIKLDISRTPAIDSPLSTQQSNSRTLFPSSARPTGVAQLFQTTPRPEIQCQKIDHMVKEESLSNMFCGIDDQSGLWPWLEQQHFN

SEQ ID NO: 3844 - protein, 221 aa, Brassica napus
DGLIKALTTDMVKFYQTCDPEKENLCLYGLPNETWEVNLPVEEVPPELPEPALGINFARDGMQEKDWVSLVAVHSDSWLLSVAFYFGARFGFGKNERKKLFQMINELPTIFEIVTGNAKQSKDLSGNNNTSSKSKSNGLKVPKMSSPPPKEEDESEDEDEDDEQGAVCGACGDSDGTDEFWICCDACEKWFHGKCVKITPAKAEHIKHYKCPSCSNKRARP

SEQ ID NO: 3845 - protein, 289 aa, Medicago truncatula
MGMDSSSGQQQQMSNQSLESMLTCSKGEQDKKPKPPQPEALKCPRCDSNNTKFCYYNNYSLSQPRYFCKSCRRYWTKGGTLRNVPVGGGCRKNKRSSSASSKRSQDQPFQTNPNPLTCFPSLSYDSNDLTLALARLQKGHLGFDHEHDFSILGNQTNTSCGILNNHGMNHSSNNQGFFEALMGSQNNVQNLYYMGEVDNGNANGNGNGEMMLPYDHEMSIATTQAVTVTTMKQEMCNVREQNENRVLLGFPWQFNNGDTNMAEMDHLGRAGWNGLTSSWGHGLLNSPLM

SEQ ID NO: 3846 - protein, 149 aa, Agapanthus africanus
ISVLCDAEVALIVFSTKGRLYEYSTESSMEGILERYERYSYAEKALVATDHDSQGNWCEDYSKLKGRIESLQKSQRHLMGEQLDLLCVKELQQLELKLENAVKHIRSRKNQLLLDSITELQKKEKELHDHNRDLAKKLIEKEKAKASHG

SEQ ID NO: 3847 - protein, 230 aa, Cyperus longus
ISVLCDAEVGLIISSSKGKLYEFATENSMDKILDRYERYSYAEKVLVSTEQDPQANWCHEYRKLKAKVEAIQKCQRHLMGEDLDSLNVKDLQQLEVQLEVSSKHIRSRKSQLVIDSISDLQRKERLLQEENKMLQKELADKQKVLTQQGHWEQHQHQQHQHQHQQQHQMQPQIQPHQQHQSNSSSPGFLLGDTLPLNISAYQGTTRGEVVAAQAQAPAGLPPWMLSPLNH

SEQ ID NO: 3848 - protein, 215 aa, Medicago truncatula
MGFIPFPTNLTFPSLDCNQSLKAFSSIASSLTSESDSTSNLTQTLLTTNPQKSKEYLTSSFGGSTPFLSLHGSIVNPWAILGGEVISNCMNNSGKRNGVDHRDNHLGVSTTMKMKKMKGRKKVREPRFCFKTLSTDVDVLDDGYKWRKYGQKVVKNTQHPRSYYRCTQENCRVKKRVERLAEDPRMVITTYEGRHVHSPSNDLEDSQTQSDNFLW

SEQ ID NO: 3849 - protein, 269 aa, Triticum aestivum
MQILNEQLAAPSTGLMVKESASPGSGSGSAGGAAEKMGRGRIEIKRIENTTNRQVTFCKRRNGLLKKAYELSVLCDAEVALIVFSGRGRLYEYSNNSVKATIERYKKATSDTSSAGTVAEINAQHYQQESAKLKQQITTLQNSNRTLIGDTMATMSHRDLKQLEGRLDKGLGKIRARKNELLCAEIEYMQRREMELQNNNFFLREKVAETERGQQQTLNMMGAASTSNEYEQNMIHCDPRTFLQFNFMQQQPQYYSQQEDRKSFNSVGR

SEQ ID NO: 3850 - protein, 1156 aa, Yarrowia lipolytica CLIB122
MRDYSDVSEAETEVAPSPYKLGSRLKRLKRRIDDDDDYSSDEGPSNHSSQVLRKEPKRKNSSDMSRSATPMPRVGSGSRKKRDANGRMKLQRMCDKGKYEEAYQLVRDGADVNDRDYAGNTALHEAALKGHVDIVKLLLDHKAIVDIRSGPTDLDTPLIDAAANDHVEVVQLLLERGADPRIINALGKSAMDSVDEEMPHSTKIRSLIQEALHSFRNRPRPPESREDDPEAFPDPELHKIYNHGTGGGEGGGAGSDTGSSRRRGVRAQAMRNDLLWLDLTSKNGREQIYQKAADGDIEFIGSSLEGGWKPDTQSLCLAARHGHTDVVGLLLAFGCECDEPGEDGETALLRTVGRGHVSTLKLLLDSGANPLRKNSQGKTALQVVKELSGYEEEVTLLEEWTSKGSGKDRGDSKLVKSEKADKSEKADKSDRDKARLEKMEKRRIERERERERERERDRERVKVEKVEKSEKSEKREKRERTNSTSERHNSTASTHSERHNSTSEIRDRERERERERERERKHVKKEPVVDTHANMSSSSPHHVASPPRVASPSQMSPVSTPMSRTSSQADENKGSVKHERTPSISSISDKLLVKKRKLAGGKEEMERRKSKEEVKVKKRSISSASGASNKPQSVFDKLFGSKQKEKEEQQRVAREKEEAARLERQERIRRKKQQQQEQLEEEKRKLEEEKRKLEEKKRLEEERLRKEQEKRDKAEKAERERVERERREKKERERKEREDKEKKEREEKERAERVEREKRERAERAEKAEKEARERKEREEKERVERVEKEKARAEKAEKEANEAAKAEKEAKDKEIKEAAEKAQAKEVKESKESKEPKESKETSKESSRESLSASSSAAASTTPSAATSPDSRKSPLIKRPKELDRQKSKESLDRREIEREKERKRLERQRAILKGIEEDERRRNEMRRREQELKAEQELLAAKEREKREAEELEREKERERQRRIQLDIDSRKALPYGLREAIYEPRQVDQIFAFLPLFVRQSCFLDIQLSLLLGVKNFCGSYPRVARRIVSTTEKERLWSTLTPLLCRAPGPGDDLEMVGLERQDERRKFLGMNCFWVSCSDVLEVISTNFPLLFDAVMSVAPLKVDIDWEEDAEAAAATAAYVEAESEQIDKAIAKFPLRVRMKLQALRPQWP

SEQ ID NO: 3851 - protein, 223 aa, Oryza sativa (indica cultivar-group)
MEPMGILKCPSSLKLSVAVPGHALNPFSDGGSGSGCNNNNTRELGIHLDLDRPYAREELPQQGGSMEVQKGEERGSVRHNSSNHRRLSRVQSKQLDEFYRVNHAVDSKQKKELADRLNLRISQVDAWFRNRRLRSKQKSTEMECAYLKECFNKLKENHRLQLQVEQLRSTSLQLQLQLQLHSERVATAPTGQQAGTSAAARIFTLPLSGYNPSRGTWFSPNAH

SEQ ID NO: 3852 - protein, 266 aa, Oryza sativa (indica cultivar-group)
MAAARQDSCKTKLDERGGSHQAPSSARWISSEQEHSIIVAALRYVVSGCTTPPPEIVTVACGEACALCGIDGCLGCDFFGAEAAGNEEAVMATDYAAAAAAAAVAGGSGGKRVRRRRKKNVYRGVRHRPWGKWAAEIRDPRRAVRKWLGTFDTAEEAARAYDRAALEFRGARAKLNFPCSEPLPMPSQRNGNGGDAVTAATTTAEQMTPTLSPCSADAEETTTPVDWQMGADEAGSNQLWDGLQDLMKLDEADTWFPPFSGAASSF

SEQ ID NO: 3853 - protein, 120 aa, Triticum aestivum
MLAGWYWVNTLSSSPLLGNRDYIAGQIFDLADKLEQAEGQLAHSRFGMLMPSQRKKEQEESPLAKVTRDSSKITAEQVHGLMSQVIKDILFNSVHPSSKSKASASGTAPDSPVPEPMVEA

SEQ ID NO: 3854 - protein, 420 aa, Oryza sativa
  misc_feature (37)..(37): Xaa can be any naturally occurring amino acid
  misc_feature (109)..(109): Xaa can be any naturally occurring amino acid
MAGVGFVEDMLREQSLLEATCGDLFDHIDDLLDFPKXEESAADVLLLDAPAPGSPLSSRIIGGHATMAAAPPPPPQMMALPPPPAPAKDDASALFDAAGALGAEVFDRXKDAHIGPCDELDMDMAQLEWLSGLFDDGTIPHEPSFPGVNCAAPIKASALTANAGVVLPDKAEEALFRSSSPISVLEHSGFNVATNGGSSSSSSSSASSSSESFSGSGRAWSAPVSPRPEPPVLVIPARARSKRSRPSAFPAVRGAPAATETTILVPTPMYSSTSSHSDPESIAESNPHPPPMKKKKKAKKPAAPAAASDAEADADAADADYEEGGALALPPGTVRRCTHCQIEKTPQWRAGPLGPKTLCNACGVRYKSGRLFPEYRPAASPTFMPSIHSNSHKKVVEMRQKATRTADPSCDLLQYIRRRD

SEQ ID NO: 3855 - protein, 375 aa, Oryza sativa (japonica cultivar-group)
MAFGQDTIEQLYRELAGGRRLSAKLQALLEGPLDSRGQKEAVDVSRELGRVFMVSLYMLKPCSNSSRRPEGVTRTAPETRTDDSICLHTPARVKRVRSEEVLVRNGREEVVTRTEIITPSPYKDGYQWRKYGQKNIQDSNYLRLYFKCTFSRERSCAAKKQVQQRDAGEPPMFLVTYLNEHTCQQPQAVPGTPNTAGSSPTTTSRQRQSSSSPPAEMLDLTMNGAGLFSRLLLPHAVGGGGSAAEEEAAIVTCLAAVISGGGAAAAPPPLIWPTSAPEAAFVASAAGHSPSAADESVADEAAAAQMADMDYCFGQYDQSTFGAAAAADHRVLIGDDGDVQRIVAARIADTVWPRYTRDTSAWETAGTSSMRGSID

SEQ ID NO: 3856 - protein, 350 aa, Oryza sativa (japonica cultivar-group)
MDPRFPPPAPSGGAPPRGHHRRAHSETFIRLPDADLLLDPDGEFGFSDLDFPSLSDDSPAASDPTPPPPPPALPQAAPRPPGGAHLRSLSLDAAFFDGLAFQGGGGGGGAGSGSSGGGAGHKRSGSMDGESSLFEGESAPPDYAKKAMPADRLAELALLDPKRAKRILANRQSAARSKERKIKYTGELERKVQTLQTEATTLSTQLTLLQLLHRTTSSSFEFKVASSSGVLGHYKAIEIKESKYIYPDKQSNLLRKPSLFNAALNDALREEVQRLKIAAGQVPNMNGNSFNGGLQQQQQQQMPTYFSQQQQMHYLSGHQGRHHHPNNPHNSLNGGQSMSGQTLNDSMDFM

SEQ ID NO: 3857 - protein, 307 aa, Triticum aestivum
MHRAAAAGLDLGLGLGLGLASQGSLTSSTTTASSSPASQAHAQHWTAALNSVVGAQESYGLHPYASHQRKEEPGRTSTSPESGVSAGTKRGLERTGSGVSRGAATAGSDEDDDGGDGAGGRKKLRLSKDQAAVLEECFKTHSTLNPKQKTALANRLGLRPRQVEVWFQNRRARTKLKQTEVDCEYMKRWCEQLAEQNKRLEKEVAELRALKTAPAAHAQQAATLTMCPSCRRVAATAAGPAATQHQHQHQQPQQCSPKPNAHPAGNVLPSHCQFFPSTTTAAAPDRSGRQQGAWNGAAQPLVTRELF

SEQ ID NO: 3858 - protein, 540 aa, Dubautia arborea
MKRSRERKKEAKTTSSVPDSGGMDELLEVLGYKVKSTDMADVAQKLEQLEMVMGEDGVLQLSDTVHYNPSDLSGWVQSMLSVLNENNNTPPSDHIVLSGDSSTTMIDFSNSSEIVVHGKQGSKMHEDDPYDLRAIAGGAIYGGESESSVRGNGNGNGIKRMKSTAVGSVDVQPESPRRVVLVDSQEAGIRLVHTLMACAEAIQHNDLKLADALVKHVGILVASQAGAMAKVATYFAGALAQRIYNIYPQNALETSCYEILQMHFYETCPYLKFAHFTANQAILEAFAGATRVHVIDFSLKQGMQWPALMQALALRSGGPPAFRLTGIGPPQPDNSDALQQVGWKLAQLADTIGVEFEFRGFVANSIADIDANMLNIRASETEVVAVNSVFEVHRLLARPGAVEKVLSGITKMKPKIVTLVEQESNHNGAVFMERFNEALHYYSTMFDSLESSALTLPNSQDDLVMSEVYLGRQICNVVACEGADRVERHETLTQWRVRMNSAGFEPVHLGSNAFKQASMLLALFAGGDGYRVEENDGCLM

SEQ ID NO: 3859 - protein, 122 aa, Brassica rapa subsp. chinensis
MGKRKELDKKVKGSTKMKSKSSEENGKLPYVHVRARRGQATDSHSLAERARREKINARMKLLRELVPGCDKIQGTALVLDEIINHVQSLQRQVEMLSMRLAAVNPRIDFNLDTLLASEVSIF

SEQ ID NO: 3860 - protein, 363 aa, Oryza sativa (indica cultivar-group)
MASEDGCGGGNPPGDAAAAPPVWNAAPAAGAGCGDLEEDLRFQCCVCLELLYKPVVIEDEKRVDTYSPQIIEFLNSKSNNCALKFASTYKMCYLLQEIDGENRPEESNSRPPQEVTSDGNTINGHPKKVKLEDVSCALCKELLYQPAVLNCGHVYCMSCLSSLDDGALKCQVCGGLHPGDFPNVCLDLDHFIEDYFPAEYDLRREKIKLLKGECNQGSSSGTSCTKEGRGRPTNKENRAHQDDDLSDVHIGVGCDSCGMYPIRGKRYKCKDCTELIGFDLCEECYNTESKLPGRFNQHHTPDHRMELDHSALFNRLMRLQGIHEEGPGEIIIEGAFVAPDAVVHIIADDHEEIEDNGEDDHLL

SEQ ID NO: 3861 - protein, 538 aa, Dubautia arborea
MKRSRERKKEAKTTSSVPDSGGMDELLEVLGYKVKSTDMADVAQKLEQLEMVMGEDGVLQLSDTVHYNPSDLSGWVQSMLSVLNENTPPSDHIVLSGDSSTTMIDFSNSSEIVVHGKQGSKMHEDDPYDLRAIAGGAIYGGESESSVRGNGNGNGIKRMKSTAVGSVDVQPESPRRVVLVDSQEAGIRLVHTLMACAEAIQHNDLKLADALVKHVGILVASQAGAMAKVATYFAGALAQRIYNIYPQNALETSCYEILQMHFYETCPYLKFAHFTANQAILEAFAGATRVHVIDFSLKQGMQWPALMQALALRSGGPPAFRLTGIGPPQPDNSDALQQVGWKLAQLADTIGVEFEFRGFVANSIADIDANMLNIRASETEVVAVNSVFEVHRLLARPGAVEKVLSGITKMKPKIVTLVEQESNHNGAVFMERFNEALHYYSTMFDSLESSALTLPNSQDDLVMSEVYLGRQICNVVACEGADRVERHETLTQWRVRMNSAGFEPVHLGSNAFKQASMLLALFAGGDGYRVEENDGCLM

SEQ ID NO: 3862 - protein, 536 aa, Dubautia ciliolata subsp. glutinosa
MKRSRERKKEAKTTSSVPDSGGMDELLEVLGYKVKSTDMADVAQKLEQLEMVMGEDGVLQLSDTVHYNPSDLSGWVQSMLSVLNDNTPPSDHMVLSGDSSTTMIDFSNSSKIVVHGKQGSKMHEDDPYDLRAIAGGAIYGGESESSVRGNGNGHKRMKSTAVGSVDVQPESPRPVVLVDSQEAGIRLVHTLMACAEAIQHNDLKLADALVKHVGILVASQAGAMAKVATYFAGALAQRIYNIYPQNALETSCYEILQMHFYETCPYLKFAHFTANQAILEAFAGATRVHVIDFSLKQGMQWPALMQALALRSGGPPAFRLTGIGPPQPDNSDALQQVGWKLAQLADTIGVEFEFRGFVANSIADIDANMLNIRASETEVVAVNSVFEVHRLLARPGAVEKVLSGITKMKPKIVTLVEQESNHNGAVFMERFNEALHYYSTMFDSLESSALTLPNSQDDLVMSEVYLGRQICNVVACEGADRVERHETLTQWRVRMNSAGFEPVHLGSNAFKQASMLLALFAGGDGYRVEENDGCLM

SEQ ID NO: 3863 - protein, 164 aa, Ustilago maydis 521
MGSKGQHVDLMSLDVQQLLEVKKQLETEVQHLTSSFGQLKAAQAKFKSCIESVASVKPENKDKTTLIPLTSSLYVPGKLSDLEKVIVDVGTGYFVEKSTADATRMYQEKVEFLTKNLEQLQETVLRQQENLQTTVEMIRLKARAEQQATSSEPGRGAAQTAAAS

SEQ ID NO: 3864 - protein, 536 aa, Dubautia ciliolata subsp. glutinosa
MKRSRERKKEAKTTSSVPDSGGMDELLEVLGYKVKSTDMADVAQKLEQLEMVMGEDGVLQLSDTVHYNPSDLSGWVQSMLSVLNDNTPPSDHMVLSGDSSTTMIDFSNSSEIVVHGKQGSKMHEDDPYDLRAIAGGAIYGGESESSVRGNGNGHKRMKSTAVGSVDVQPESPRPVVLVDSQEAGIRLVHTLMACAEAIQHNDLKLADALVKLVGILVASQAGAMAKVATYFAGALAQRIYNIYPQNALETSCYEILQMHFYETCPYLKFAHFTANQAILEAFAGATRVHVIDFSLKQGMQWPALMQALALRSGGPPAFRLTGIGPPQPDNSDALQQVGWKLAQLADTIGVEFEFRGFVANSIADIDANMLNIRASETEVVAVNSVFEVHRLLARPGAVEKVLSGITKMKPKIVTLVEQESNHNGAVFMERFNEALHYYSTMFDSLESSALTLPNSQDDLVMSEVYLGRQICNVVACEGADRVERHETLTQWRVRMNSAGFEPVHLGSNAFKQASMLLALFAGGDGYRVEENDGCLM

SEQ ID NO: 3865 - protein, 536 aa, Dubautia menziesii
MKRSRERKKEAKTTSSVPDSGGMDELLEVLGYKVKSTDMADVAQKLEQLEMVMGEDGVLQLSDTVHYNPSDLSGWVQSMLSVLNDNTPPSDHIVLSGDSSTTMIDFSNSSEIVVHGKQGSKMHEDDPYDLRAIAGGAIYGGESESSVRGNGNGIKRMKSTAVGSVDVQPESPRPVVLVDSQEAGIRLVHTLMACAEAIQHNDLKLADALVKLVGILVASQAGAMAKVATYFAGALAQRIYNIYPQNALETSCYEILQMHFYETCPYLKFAHFTANQAILEAFAGATRVHVIDFSLKQGMQWPALMQALALRSGGPPAFRLTGIGPPQPDNSDALQQVGWKLAQLADTIGVEFEFRGFVANSIADIDANMLDIRASETEVVAVNSVFEVHRLLARPGAVEKVLSGITKMKPKIVTLVEQESNHNGAVFMERFNEALHYYSTMFDSLESSALTLPNSQDDLVMSEVYLGRQICNVVACEGADRVERHETLTQWRVRMNSAGFEPVHLGSNAFKQASMLLALFAGGDGYRVEENDGCLM

SEQ ID NO: 3866 - protein, 198 aa, Coprinopsis cinerea okayama7#130
MAMERLRKQFASDPSFLNEGSMGLVASESNPSGRSGHIPGYPVGSIFKSRRDCAKARVHGMNVAGIHGSKHYGAYSICMSGGYEDDTDEGDFIIYTGTGGQVDSYGGTSSQQQDQSFSHPDNAALALNCQNGRPVRVVRGPNSDSPWAPHTGYRYDGLYKVEKAYLAKGKSGYVVCRYELRRLPDQPPIPLKSSIKPL

SEQ ID NO: 3867 - protein, 236 aa, Helianthus annuus
MDFHGFAEHALELRLSTTSSVAENTTNPIKKPSPSSDHCLEPSLTLALSGDSCGGSSFSIASAKREREVPSEESERGGENTSGEEDEDGGVNGKKKLRLTKAQSGLLEEAFKLHTTLNPKQKQELARDLKLRPRQVEVWFQNRRARTKLKQTEVDCEYLKRCCNTLTDENQRLRQEVQELKAQKVSPALYMQLPTTTLTVCPSCEQIGDTKSATSKNPCTKKPSFFNPFTSSSAAC

SEQ ID NO: 3868 - protein, 151 aa, Cytisus racemosus
KDRHSKIYTSQGLRDRRVRLSIEIARKFFDLQDMLGFDKASNTLEWLFNKSKKAIKELARSKNSNISEGDAKSLSSSSDCEDCNEVVSGINNEQIGIITADHDALNLQQQGLDSNAVKEMRKLKRAQKEPACVRAKMNESREKARARARER

SEQ ID NO: 3869 - protein, 139 aa, Helianthus annuus
FHTFANTELALELGLNPTLSMAENTTNPTKKPNPSSDHPLEPNLTLALSGDSCGGSSFSNACVKREREVASDESGERGVENTSGEEDEDGGVNCKKKLRLTKAQSGLLEEAFKLHTTLNPKQKQELARDLKLRPRQVEV

SEQ ID NO: 3870 - protein, 134 aa, Joinvillea ascendens
ISVLCDAEVALIIFSTKGRLYEYATDSCMDKILERYERYSYAEKVLVSADSEAQGNWCHEYRKLKAKVEAIQKCQRHLMGEDLDSLNIKELQQLEHQLESSLKHIRSRKSQLMLESISELQKKGKSLQEENKQL

SEQ ID NO: 3871 - protein, 240 aa, Prunus persica
MGRGRVELKRIENKINRQVTFAKRRNGLLKKAYELSVLCEAEVALIIFSNRGKLYEFCSSSSMLKTLERYQKCNYGAPETNVSAREALELSSQQEYLKLKARYEALQRNQRNLLGEDLGPLSSKELESLERQLDMSLKQIRSTRTQCMLDQLTDLQRKEHMLNEANKTLKQRLFEGYHVNSLQMNPNADEYGRQQTQAHGDGFFHPLDCEPTLQIGYQNDPISVVTAGPSVSNYMAGWLP

SEQ ID NO: 3872 - protein, 266 aa, Triticum aestivum
MSSIGMMEARMPPGFRFHPRDEELVLDYLLHKLTGRRAYGGVDIVDVDLNKCEPWDLPEAACVGGREWYFFSLRDRKYATGQRTNRATRSGYWKATGKDRAILAHGAGDALVGMRKTLVFYQGRAPKGTRTEWVMHEFRLEEERHRHHHQQKGGAAAAEARCQLKEDWVLCRVFYKSRTSSPRPPSEEVCTFFSELDLPTMPPLAPLIDACIAFDSGTAMNTIEQVSCFSGLPALPLRGSMSFGDLLGWDTPEKKAIRTSLSHMVS

SEQ ID NO: 3873 - protein, 386 aa, Dactylis glomerata
MEGVEESNREAVQSCHRVLSLLSNPHGQLVPHKELVEATGEAVSKFGSVATKIATNGNGRQGHARVRKKINQPMPMFDSSLFLETTASAADAAAAKTSQPGPDTILRLFPRYQQVEGSSSKDPVRIPAQFPRRLLLENPSVGSNGPARGPPVQLVQPVSVAPPAGTPAPALPAAHLHFIQQQQSYQRFQLMHQMKLQSEMMKRGGLGEQGGSNGGVNLKFASSNCTGSSSRSFLSSLSMEGSMASLDVSRSSRPFQLVSGSQTSSTPELGLMQRKRCAGKEDGSGRCATGGRCHCAKKRKLRIRRSIKVPAISNKVADIPADEFSWRKYGQKPIKGSPHPRGYYKCSSVRGCPARKHVERCVDDPAMLIVTYEGDHNHNRAAAQPA

SEQ ID NO: 3874 - protein, 149 aa, Triticum aestivum
HSITSLYKKAGWYRSGIPGISSTHASEDVDRIKGPWSPEEDDALQRLVGRHGARNWSLISKSIPGRSGESCRLRWCNQLSPQVEHRPFTPDEDNTILRAHAMFGNEWATIARLLSGRTDYAIKNHWNSTLKRKYSSSLVLSCPAAYSAF

SEQ ID NO: 3875 - protein, 538 aa, Dubautia raillardioides
MKRSRERKKEAKITSSVPDSGGMDELLEVLGYKVKSTDMADVAQKLEQLEMVMGEDGVLQLSDTVHYNPSDLSGWVQSMLSVLNDYNNTPPSDHIVLSGDSSTTMIDFSNSSEIVVHGKQGSKMHEDDPYDLRAIAGGAIYGGESESSVRGNGNGIKRMKSTAVGSVDVQPESPRPVVLVDSQEAGIRLVHTLMACAEAIQHNDLKLADALVKHVVILVASQAGAMAKVSTYFAGALAQRIYNIYPQNALETSCYEILQMHFYETCPYLKFAHFTANQAILEAFAGATRVHVIDFSLKQGMQWPALMQALALRYDGPPAFRLTGIGPPQPDNSDALQQVGWKLAQLADTIGVEFEFRGFVANSIADIDADMLDIRASETEVVTVNSVFEVHRLLARPGAVEKVLSGITKMKPKIVTLVEQESNHNGAVFMERFNEALHYYSTMFDSLESSALTLPNSQDDLVMSEVYLGRQICNVVACEGADRVERHETLTQWRVRMNSAGFEPVHLGSNAFKQASMLLALFAGGDGYRVEENDGCLM

SEQ ID NO: 3876 - protein, 538 aa, Wilkesia gymnoxiphium
MKRSRERKKEAKTTSSVPDSGGMDELLEVLGYKVKSTDMADVAQKLEQLEMVMGEDGVLQLSDTVHYNPSDLSGWVQSMLSVLNDNNNTPPSDHIVLSGDSSTTMIDFSNSSEIVVHGKQGSKMHEDDPYDLRAIAGGAIYGGESESLVRGNGNGIKRMKSTAVGSVDVQPESPRPVVLVDSQEAGIRLVHTLMACAEAIQHNDLKLADALVKHVGILVASQAGAMAKVATYFAGALAQRIYNIYPQNALETSCYEILQMHFYETCPYLKFAHFTANQAILEAFAGATRVHVIDFSLKQGMQWPALMQALALRSGGPPAFRLTGIGPPQPDNTDALQQVGWKLAQLADTISVEFEFRGFVANSIADIDANMLDIRPSETEVVAVNSVFEVHRFLARPGDVEKVLSGITKMKPKIVTLVEQESNHNGAVFMERFNEALHYYSTMFDSLESSALTLPNSQDDLVMSEVYLGRQICNVVACEGADRVERHETLTQWRVRMNSAGFEPVHLGSNAFKQASMLLALFAGGDGYRVEENDGCLM

SEQ ID NO: 3877 - protein, 170 aa, Cucumis melo
FLLPSPTAAASPPELAQPRPGFGSFDMNVVMVLSVLLCALICSLGLNAILKCALRCSTLLATVSGGRGGGALVVHPKGVRRNVLKKFPTVEYSKEGNKLRGIDGECVICLLEFEAGDRVRVLPKCYHGFHVHCIDKWLSSHTSCPKCRNCLTDTCHKIAAGCGQETPVTT

SEQ ID NO: 3878 - protein, 270 aa, Triticum aestivum
  misc_feature (155)..(155): Xaa can be any naturally occurring amino acid
  misc_feature (162)..(162): Xaa can be any naturally occurring amino acid
MATQRAATAAWTNEEDKAFENAVASGAPPPLDGVPEEDWFAALAASVPARSTEEVRRHYEALVEDVGAIDAGRVPLPRYAGEDSTPAAAAAPSKDRREDRKSFDSDSGKGCSKAEQERRKGIPWTEEEHRLFLLGLDKFGKGDWRSISRNFVISXRTPTQVXASHAQKYFIRLNSMNRDRRRSSIHDITSINNAAQAVPPITGQAPAALGGPPGGMMKHPGMVGMYGGAPMGHPVAGHMVPAAVGTPVMFPPGPGHPPYAMPVGYPAPHQ

SEQ ID NO: 3879 - protein, 538 aa, Argyroxiphium kauense
MKRSRERKKEAKTTSSVPDSGGMDELLEVLGYKVKSTDMADVAQKLEQLEMVMGEDGVLQLSDTVHYNPSDLSGWVQSMLSVLNDNNNTPPSDHIVLSGDSSTTMIDFSNSSEIVVHGKQGSKMHEDDPYDLRAIAGGAIYGGESESSVRGNGNGIKRVKSTAVGSVDVQPESPRPVVLVDSQEAGIRLVHTLMACAEAVQHNDLKLADALVKHVGILVALQAGAMAKVATYFAGALAQRIYNIYPQNALETSCYEILQMHFYETCPYLKFAHFTANQAILEAFAGATRVHVIDFSLKQGMQWPALMQALALRSGGPPAFRLTGIGPPQPDNSDALQQVGWKLAQLADTIGVEFEFRGFVANSIADIDANILDIRAPETEVVAVNSVFEVHRLLARPGAVEKVLSGITKMKPKIVTLVEQESNHNSAVFMERFNEALHYYSTMFDSLESSALTLPNSQDDLVMSEVYLGRQICNVVACEGADRVERHETLTQWRVRMNSAGFEPVHLGSNAFKQASMLLALFAGGDGYRVEENDGCLM

SEQ ID NO: 3880 - protein, 442 aa, Glycine max
MEEETSDAMNLDLNLGPGPEPETGPISNEAVNLDDWIGEPLQRISEAVRYRARQRWRWRQLPLPPPEFHAHFPTEATRHFQIPPEAHNISVELNHFLVNSGNGSALQAGEGSVAAEERMEEVPKACENINGVAEDEASQKKGDIEKGSGNDGDFFDCNICLDLARDPVVTCCGHLFCWSCLYRWLHLHSDAKECPVCKGEVTLKSVTPIYGRANNVRGPEEDSALKIPPRPQAKRVESLRQTIQRNAFALPVEEMIRRLGSRIELTRDLVQPPEPDAARETAERTTSLLRFLTAQGIRREHQNLVAPPEDVMGLAQNNVNTSEAGDPRTRVQSHLLRRTQSHRATLSTLSSALTSAERLVEAYFRSNPLGRNQEQPPPPVEDRDSFSSIGAVINSESQLDTAVEIDSMVSLSTSSSRRRNDASRVSDVDSGDSRAPRRRRLN

SEQ ID NO: 3881 - protein, 219 aa, Triticum aestivum
MAPKNALPVAVAAAADGGMEPRFRGVRKRPWGRYAAEIRDPARKARVWLGTFDTAEAAARAYDAAALHYRGPKAKTNFPVGTVAAYTHIPLPPPKALAVSPSSSTVESSSRDTPAAAPAAPAAAAPAAPPALDLSLAMPAMVAAQPFLFLDPRVAVTVAVAAPAPAPAPCRSAAISGMNKVASREGEQSDTGSSSSGVDPPPPVGVGFDLNLPPPVEMA

SEQ ID NO: 3882 - protein, 538 aa, Argyroxiphium sandwicense subsp. macrocephalum
MKRSRERKKEAKTTSSVPDSGGMDELLEVLGYKVKSTDMADVAQKLEQLEMVMGEDGVLQLSDTVHYNPSDLSGWVQSMLSVLNDNNNTPPSDHIVLSGDSSTTMIDFSNSSEIVVHGKQGSKMHEDDPYDLRAIAGGAIYGGESESSVRGNGNGIKRMKSTAVGSVDVQPESPRPVVLVDSQEAGIRLVHTLMACAEAIQHNDLKLADALVKHVGILVASQAGAMAKVATYFAGALAQRIYNIYPQNALETSCYEILQMHFYETCPYLKFAHFTANQAILEAFAGATRVHVIDFSLKQGMQWPALMQALALRSGGPPAFRLTGIGPPQPDNSDALQQVGWKLAQLADTIGVEFEFRGFVANSIADIDANMLDIRPSETEVVAVNSVFEVHRLLARPGAVEKVLSGITKMKPKIVTLVEQESNHNGAVFMERFNEALHYYSTMFDSLESSALTLPNSQDDLVMSEVYLGRQICNVVACEGADRVERHETLTQWRVRMNSAGFEPVHLGSNAFKQASMLLALFAGGDGYRVEENDGCLM

SEQ ID NO: 3883 - protein, 85 aa, Oryza sativa (indica cultivar-group)
MSGSRSSSPNSKSEWSRKENKMFEEALAYYGEDTPNRWDKVASAMGGIKSAEEIRCHYEDLTDDVKTIESGRVQFPKYKTQGYWT

SEQ ID NO: 3884 - protein, 148 aa, Pueraria montana var. lobata
KDRHSKMMTSKGLRDRRVRLSVNTAIQFYDLQDRLGYDQPSKAVEWLIKAASEAISELPSLNNPFPDTPKQPSDEKRPTSGQRGGQPQQGFDDADGDTSYHQNQSQNLSLSKSACSSTSETSKGSGLSLSRSEIRVNRVKARARARER

SEQ ID NO: 3885 - protein, 124 aa, Morus alba
STLALSLAPNDVRENQIQFALERGIPATLGILATKRLPYPSRSFELAHCSRCRIDWLQRGGILLLELDRLLRPGGHFVYSSPEAYASDPENRRIWTAMSDLLKRMCWRVVAKKDQSVIWAQPKW

SEQ ID NO: 3886 - protein, 212 aa, Ehrharta erecta
ISVLCDTEVAAIVFSPKGKLYEYATDSRMDKILERYERYSYAEKALISAESESEGNWCHEYRKLKAKIETIQKCHKHLMGEDLDSLNLKELQQLEQQLESSLKHIRSRKSHLMMESISELQKKERSLQEENKALQKELVERQKHAVRQQQQVQWDQTQQAQAQAQAQAQAQTQAQTSSSSSFVMRDQQQLQAAQQNICYPPVSMGEAAAAAA

SEQ ID NO: 3887 - protein, 1797 aa, Helicobacter pylori
MNEENDKLETSKKTQQDSPQDLSNEEATEVNRFEDSSKESEESSDHYLDNPTETKTNFDEYELEETQTQMDSGGNETSESSNGSLADKLFKKARKLVDNKRPFTQQKNLDEETQELNEEDDQENNGYQEETQIDLIDDETSQKTQQHSPQDLSNEEATEVNRFEDSSKESEESSDHYLDNPTETKTNFDEDKSEEITNDSNDQEIIKGSKKKYIISGIVVAVLIVIILFSRSIFHYFMPLEDKSSRFSKDRNLYVNDEIQIRQEYNRLLKERNEKGNMIDKNLFFNDDPNRTLYNYLNIAEIEDKNPLRAFYECISNGGNYEECLKLIKDKKLQDQMKKTLEVYKDCIKNAKTEEERIKCLDLIKDENLKKSLLNQQKVQVALDCLKNAKTDEERNECLKLINDPEIREKFRKELGLQKELQEYKDCIKNAKTEAEKNECLKGLSKEAIERLKQQALDCLKNAKTDEERNECLKNIPQDLQKELLADMSVKAYKDCVSKARNEKEKQECDKLLTPEAKKKLEQQVLDCLKNAKTDEERKKCLKDLPKDLQSDILAKESLKAYKDCTSQAKTEDEKKECEKLLTPEAKKLLEEEAKESVKAYLDCVSQAKTEDEKKECEKLLTPEAKKKLEEAKKSVKAYLDCVSQAKTEDEKKECEKLLTPEARKLLEKQALDCLKNAKTEAEKKRCVKDLPKDLQKKVLAKESVRVYLDCVSRAKNEAERKECEKLLTPEARKLLEEAKESVKAYKDCVSRARNEKEKKECEKLLTPEAKKLLEEEAKESVKAYLDCVSQARTEAEKKECEKLLTPEARKLLEEAKESVKAYKDCVSQAKTEAEKKECEKLLTPEAKKLLEQQALDCLKNAKTEADKKRCVKDLPKDLQKKVLAKESLKAYKDCVSQAKTEAEKKECEKLLTPEAKKLLEEAKESLKAYKDCVSRARNEKEKKECEKLLTPEAKKLLEEAKESVKAYKDCVSRARNEKEKKECEKLLTPEAKKLLEQQALDCLKNAKTEADKKRCVKDLPKDLQKKVLAKESVKAYLDCVSRARNEKEKQECEKLLTPEAKKLLEEAKESLKAYKDCLSQARNEEERRVCEKLLTPEAKKLLEQEVKKSVKAYLDCVSRARNEKEKQECEKLLTPEARKFLAKQVLSCLEKARNEEERKACLKNLPKDLQENVLAKESLKAYKDCLSQARNEEERRACEKLLTPEAKKLLEQEVKKSVKAYLDCVSRARNEKEKQECEKLLTPEARKFLAKELQQKDKAIKDCLKNADPNDRVAIMKCLDGLSDEEKLKYLQEAREKAVLDCLKTARTDEEKRKCQNLYSDLIQEIQNKRTQNKQNQLSKTERLHQASECLDNLDDPTDEQAIEQCLEGLSDSERALILGIKRQADEVDLIYSDLRNRKTFDNMAAKGYPLLPMDFKNGGDIATINATNVDADKIASDNPIYASIEPDITKQYETEKTIKDKNLEAKLAKALGGNKKDDDKEKSKKSTAEAKAESNKIDKDVAETAKNISEIALKNKKEKSGEFVDENGNPIDDKKKAEKQDETSPVKQAFIGKSDPTFVLAQYTPIEITLTSKVDATLTGIVSGVVAKDVWNMNGTMILLDKGTKVYGNYQSVKGGTPIMTRLMIVFTKAITPDGVIIPLANAQAAGMLGEAGVDGYVNNHFMKRIGFAVIASVVNSFLQTAPIIALDKLIGLGKGRSERTPEFNYALGQAINGSMQSSAQMSNQILGQLMNIPPSFYKNEGDSIKILTMDDIDFSGVYDVKITNKSVVDEIIKQSTKTLSREHEEITTSPKGGN

SEQ ID NO: 3888 - protein, 139 aa, Wisteria floribunda
KDRHSKIHTSQGLRDRRVRLSIDIARKFFDLQDMLGFDKASNTLEWLFSKSNKAIEELTRIKHCSSDVDDDHVHGFSSSSSEGEVVSKDIIDTIPDLQQQQMVDSKERNLKRAQKELPACVWAKMKESREKARARARER

SEQ ID NO: 3889 - protein, 245 aa, Hordeum vulgare subsp. vulgare
GTRCGLAAMSSYSSLISVSPGEQIGGYADQGDDDDMAAAANYLSSFCFDFGDEYSVGKAATASYPLHGQQQQAPTKADSHHSGQAASITSSQRFDNINTSLTSSDARSKGSKIAFKTRSEVEVLDDGYRWRKYGKKMVKNSPNPRNYYRCSSEGCRVKKRVERDRDDERFVITTYDGVHNHLAPLPPQGCAGYSLSLAQTRVDEGSSPLPMEGRRCFLDAMKMHAAGSLAGSSPVPAPRTLERHN

SEQ ID NO: 3890 - protein, 102 aa, Oryza sativa (japonica cultivar-group)
MDWSRAENARFEQALAMYDRDTPGRWERVAAVVGGGKTADDVRRHFDLLVDDCGSIESGNYGYPGTGAGAGRGSGNGNGNGRDKNNDGNTNRRQSRANGPQT

SEQ ID NO: 3891 - protein, 368 aa, Hordeum vulgare subsp. vulgare
MNCNFNSDLLEKEAGRTSFPWARPCDGCHAAPSAVYCCADAAYLCSSCDTQVHSANRVASRHERVRVCETCESTPAVLACHADAAALCTACDAQVHSANPIAQRHQRVPVLPLPAVAIPAASGFAEAEASVTAHGDKEGGEEVDSWLLRRNSDDNNCANKIDRYFNLVGYNMYYDNITCDPRPQEQYRMQEQQHVQNRYREKEGCECVVPPQVVMASEQQGSNYGTIGAGQAASVTAMASTYTASISNDISFSSMEVGIVPDNTRPNISNRNILTSSEAIELSGHSLQMPVHFSSMDREARVLRYKEKKQARKFQKTIRYATRKAYAEARPRIKGRFAKRSDIEHEENHMLSPPALPDTSSYNTVPWF

SEQ ID NO: 3892 - protein, 354 aa, Oryza sativa (japonica cultivar-group)
MELGLSLGDAVTVADGGRLELVLGLGVGVGAGVRRGEEEERGRREDVVGAGRWAAMAAASPEPSVRLSLVSSLGLHWPSETGRSEAAARGFDVNRAPSVAAGAPGMEDDEEGPGAAPALSSSPNDSGGSFPLDLSGQGLRGHAEAAAQGGGGGGGGERSSSRASDDDEGASARKKLRLSKEQSAFLEESFKEHSTLNPKQKVALAKQLNLRPRQVEVWFQNRRARTKLKQTEVDCEYLKRCCETLTEENRRLHKELAELRALKTARPFYMHLPATTLSMCPSCERVASNPATASTSAPAAATSPAAAPTAAARTAVASPEPHRPSSFAALFAAPLGFPLTAAQPRPPPPASNCL

SEQ ID NO: 3893 - protein, 298 aa, Oryza sativa (japonica cultivar-group)
MGRTPCCDSKVLKKGPWTPDEDKLLVDYVQANGSGNWRLLPKLAGLNRCGKSCRLRWTNYLRPDIKRGPFTPEEHKSILQLHAIVGNKWSMIAAQLPGRTDNEIKNYWNTNVKKQLRQGQAAAVGEQAALASLGGGAASCPAARHMAQWETARLEAEARLSLLSGTTSVATASVAASSSSSSTAAAGGAEAPPDIYLRLWNSEVGDSFRKSARSAAREDQEPANASDEAAPVSATFARPGDDSSAASNVTAAAAADEYQVFLDLAAEDFELFHGRHGGFPLFPAVDMLGETSLYTAFD

SEQ ID NO: 3894 - protein, 126 aa, Zea mays
EFPGQKQKAALAKQLNLKPRQVEVWFQNRRARTKLKQTEVDCEFLKRCCETLTEENRRLQREVAELRVLKLVAPHHYARMPPPTTLTMCPSCERLASASASADQAGRAGPCWGPLPVFVDGPARRP

SEQ ID NO: 3895 - protein, 311 aa, Oryza sativa (japonica cultivar-group)
MKRPTSSSRKSKKQGEDLAFSEEGSLPAVTMEQKDEAEMEEVDEEEEEEVDEDMAGGHAAQSPSPSCGLGEKKRRLALEQVRALERSFDTDNKLDPDRKARIARDLGLQPRQVAVWFQNRRARWKTKQLERDFAALRARHDALRADCDALRRDKDALAAEIRELREKLPTKPADTAASVKVEAGNDAAAGAAAATVCKDGSSDDSDSSVVFNDEASPYSGAAFIGFGPSFLVDDASAATVGCSSSLPALESKWHGPYSDDSCKGGVYGFTEEWLAACSGEMAGNDAAGFFSDEHASNLNFGWCASGNEGWE

SEQ ID NO: 3896 - protein, 111 aa, Oryza sativa (indica cultivar-group)
MASAAGSKQQQAMMSLPSSRGGGGGGWTQRQNKQFECALAVYDKETPDRWHNIARYMGGAKSADEVRRHFDHLVEDVARIESGRVPFPRYSSSSSSRGADDGNRSRYLKYQ

SEQ ID NO: 3897 - protein, 310 aa, Zea mays
  misc_feature (248)..(248): Xaa can be any naturally occurring amino acid
  misc_feature (252)..(252): Xaa can be any naturally occurring amino acid
MAQEDVHLDDAGLALGLSLGSGSGGASGAARHGGISRRLSREVRLPSPHPLEPSLTLSLPDEATATGSGGGGAAHSVSSLSVAGVKRERVDDAEGERASSTAALPRACAGAEDDDDDGSTRKKLRLTKEQSALLEDRFKEHSTLNPKQKVALAKQLKLRPRQVEVWFQNRRARTKLKQTEVDCELLKRCCESLTEENRRLQRELQELRALKFAPHPQAPPSSATQAGAAAGVVPAPPPPLYMQMQMPXPPPXEPVPVLRPPGRARAPPPRPSPGPTGPRPPPTTSSTPSPTPPPADDEGRAARSHATQRQ

SEQ ID NO: 3898 - protein, 245 aa, Oryza sativa (indica cultivar-group)
MENFPILFATQPTSSSTSSSYHFMSSSSGSHDHRHHHGLQAGGNGGGGGGSLSHGLFMGSSSSSIRMEELSNSQQADDAVVDGGATRSPHGGDGDGAAGDDGGDAQAAAAAGGGGRKKGEKKERRPRFAFQTRSQVDILDDGYRWRKYGQKAVKNNKFPRSYYRCTHQGCNVKKQVQRLSRDETVVVTTYEGTHTHPIEKSNDNFEHILTQMHIYSGLTPSSAAHASSSSPLFPSAAAAASHMFQ

SEQ ID NO: 3899 - protein, 243 aa, Glycine max
MGRGKIEIKLIENPTNRQVTYSKRRNGIFKKAHELSVLCDAKVSLIMFSKNNKMHEYISPGLTTKKIIDQYQKTLGDIDLWHSHYEKMLENLKKLKDINNKLRRQIRHRIGEGLDMDDMSFQQLRTLEEDMVSSIGKIRERKFHVIKTRTDTCRKKVKSLKQMNGNLLLELKEKCVIHPQFLLHDEGDEESAAAAAAAAVALANGASTLYAFCHQHHSHLNLFSHHSNGEEQPFKTDHDLRLA

SEQ ID NO: 3900 - protein, 313 aa, Hordeum vulgare subsp. vulgare
MSCEGGGTAITGKKRDRAHIQTLVREGSLYNLTLSEVESHLGAPLLSMNLDEFVRSVLPDEKNLPLPNGAGNSGSQSTSAFGLERQGSSITVPLPLSKKTVDEIWRDIQQDQDNSDDEKRSSGCEAQMSFGEITLEEFLQRAGIVTGQCQKDAEELIDFVGTGESAHLMTRVQDFPQGTSAIDAYIVRQSIAQPLSVAIPSTMDAIYPDRQMSISSSLELSDLQSPSRKRMSSQDVVYKVADRRQKRMIKNRESAARSRARKQAYTNELECKLSCLEEENKRLKREKELDMLLKSAPPPEPKKHLRRTRSTSF

SEQ ID NO: 3901 - protein, 201 aa, Cimicifuga racemosa
AGITKKAQELTVLCDAQVSLIMISSTGKLFEYTSSSTTTKSIYDRYQQTTGLNLWQSHYEKMQENLNKLKETNSKLRREIRQRNGEDIDDLTFQQLRGLEQHMEKSVERVRHRKFHVIGTSTDTYKKKIKSLEETHNNLLRAFEERIEEDCHYALVDQEGDYQSAIGLANGGPHIFSIRLQPSQPNLRDDEGYASYGLRLA

SEQ ID NO: 3902 - protein, 345 aa, Capsicum annuum
MDRVKGPWSPEEDELLQQLVQKHGPRNWSLISKSIPGRSGKSCRLRWCNQSSPQVEHRPLTPEEDDTIIRPHARFGNKWATIARLLNGRTDNAIKNHWNSTLKRKCCSLSADEGRELADQIFENHQPPLKRSVSAGSAMPVSGFHFSPGSPAGSDSDSSLHVTSSSQSHVFKPVAKTGGIFPPPSIDISSPSIDPPTSLSLSLPGADLAELSSRSAESTQSKNPFQLSLPPPVQVPPPPPPPPPPPQPQPVTAVPFEQQDKIFVPFSQELLRVMQEMIKTEVRNYMMGIEQKQQHPQQQHYQQQQQFQQQTHQLPSGLGLGLCMQQASDGYRDRAANRMGISKFD

SEQ ID NO: 3903 - protein, 537 aa, Argyroxiphium sandwicense subsp. macrocephalum
MKRSRERKKEAKTTSSVPDSGGMDELLEVLGYKVKSTDMADVAQKLEQLEMVMGEDGVLQLSDTVHYNPSDLSGWVQSMLSVLNDNNTPPSDHIVLSGDSSTTMIDFSNSSEIVVHGKQGSKMHEDDPYDLRAIAGGAIYGGESESSVRGNGNGIKRMKSTAVGSVDVQPESPRPVVLVDSQEAGIRLVHTLMACAEAIQHNDLKLADALVKHVGILVASQAGAMAKVATYFAGALAQRIYNIYPQNALETSCYEILQMHFYETCPYLKFAHFTANQAILEAFAGATRVHVIDFSLKQGMQWPALMQALALRSGGPPAFRLTGIGPPQPDNSDALQQVGWKLAQLADTIGVEFEFRGFVANSIADIDANMLDIRPSETEVVAVNSVFEVHRLLARPGAVEKVLSGITKMKPKIVTLVEQESNHNGAVFMERFNEALHYYSTMFDSLESSALTLPNSQDDLVMSEVYLGRQICNVVACEGADRVERHETLTQWRVRMNSAGFEPVHLGSNAFKQASMLLALFAGGDGYRVEENDGCLM

SEQ ID NO: 3904 - protein, 247 aa, Helianthus annuus
SYMSSCPFKKNEIFFANKTIYEAALSSSTLHIVDFGIAYGFQWPILIKHLGDRPGGPPKLRITGIEFPQPGFRPAEWVEETGRRLATYCERFKVPFEIYNAIAIQNWEMINIDDLKLQRNEFLAVNALARFENLLDETMVTGSSPRDAVLKLVRDMKPDIFVHSIVNGSYSAPFFVTRFREALFHYSALFDMLDATIERENEQRQSYEGEFHGRQVMNVIACEGPQRVERPETYKQWQVRITRAGSN

SEQ ID NO: 3905 - protein, 535 aa, Madia sativa
ERKKEAKTTSSVPDSGGMDELLEVLGYKVKSTDMADVAQKLEQLEMVMGEDGVLQLSDTVHYNPSDLSGWVQSMLLVLNEDNNNTLDDDVSDHILLPGNSSTTMIDFSSSRTETVNRKHGSKMLEDDPYDLRAIAGGAIYRPESEGIGNGMKRMKTTAAGSEVVDVQPESPRPVVLVDSQEAGIRLVHTLMACAEAIQHNDLKLADALVKHVGILVASQAGAMAKVATYFAGALAQRIYNIYPQNALETSCNENLQMHFYETCPYLKFAHFTANQAILEAFAGATRVHVIDFSLNQGMQWPALMQALALRSGGPPAFRLTGIGPPQPDNSDALQQVGWKLAQLADTIGVEFEFRGFVANSIADIDANMLDIRASETEVVAVNSVFEVHRLLARPGSVEKVLSSITGMKPKIVTLVEQESNHNGAVFMERFNEALHYYSTMFDSLESSALTLPNSQDDLVMSEVYLGRQICNVVACEGTDRVERHETLTQWRVRMNSAGFEPVHLGSNAFKQASMLLALFSGGDGYRVEENDGCLM

SEQ ID NO: 3906 - protein, 336 aa, Arabidopsis thaliana
MELALSLGDNTKKQFSFMEKNSKINNPSVSSTSTSEKDLGFCMALDVAFGGHRSLSSSSSPSVEDEKKKPAPRAKKSDEFRVSSSVDPPLQLQLHFPNWLPENSKGRQGGRMPLGAATVVEEEEEEEEAVPSMSVSPPDSVTSSFQLDFGIKSYGYERRSNKRDIDDEVERSASRASNEDNDDENGSTRKKLRLSKDQSAFLEDSFKEHSTLNPKQKIALAKQLNLRPRQVEVWFQNRRARTKLKQTEVDCEYLKRCCESLTEENRRLQKEVKELRTLKTSTPFYMQLPATTLTMCPSCERVATSAAQPSTSAAHNLCLSTSSLIPVKPRPAKQVS

SEQ ID NO: 3907 - protein, 548 aa, Carlquistia muirii
MKRSREHKKEAKSTSSVPDSGGMDELLEVLGYKVKSTDMADVAQKLEQLEMVMGEDGVLQLSDTVHYNPSDLSGWVQSMLLVLNDDNNNNNTADDSDHIFLPGNSLTTMIDFSNSTETVVHGKQRSKLHEDDPYDLRAIAGGAIYRSESESSMRGNGNPNGNGMKRMKTTAAGSEVVDVQPESPRPVVLVDSQEAGIRLVHTLMACAEAIQHNDLKLADALVKHVGILVASQAGAMAKVATYFAGALAQRIYNIYPQNAIETSCYEILQMHFYETCPYLKFAHFTANQAILEAFAGATRVHVIDFSLNQGMQWPALMQALALRSGGPPAFRLTGIGPPQPDNSDVLQQVGWKLAQLADTIGVEFEFRGFVANSIADIDVSMLDIRAPDTEVVAVNSVFEVHRLLARPGAVEKVLSSITGMKPKIVTLVEQESNHNGAVFMERFNEALHYYSTMFDSLESSALTLPNNQDDLVMSEVYLGRQICNVVACEGTERVERHETLTQWRVRMNSAGFEPVHLGSNAFKQASMLLALFAGGDGYKVEENDGCLM

SEQ ID NO: 3908 - protein, 136 aa, Oryza sativa (japonica cultivar-group)
MRALQDLVPNTNKTDRAAMLDEILDYVKFLRLQVKVLSMSRLGGAGAVAQLVADIPISVKGEASDSGSKQQIWEKWSTDGTEKQVAKLMEEDIGAAMQFLQSKALCMMPISLAMAIYDTQHSQDGHSVKPEPNTPS

SEQ ID NO: 3909 - protein, 548 aa, Carlquistia muirii
MKRSRERKKEAKTTSSVPDSGGMDELLEVLGYKVKSTDMADVAQKLEQLEMVMGEDGVLQLSDTVHYNPSDLSGWVQSMLLVLNDDNNNNNTADDSDHIFLPGNSLTTMIDFSNSTETVVHGKQRSKLHEDDPYDLRAIAGGAIYRSESESSIRGNGNPNGNGMKRMKTTAAGSEVVDVQPESPRPVVLVDSQEAGIRLVHTLMACAEAIQHNDLKLADALVKHVGILVASQAGAMAKVATYFAGALAQRIYNIYPQNAIETSCYEILQMHFYETCPYLKFAHFTANQAILEAFAGATRVHVIDFSLNQGMQWPALMQALALRSGGPPAFRLTGIGPPQPDNSDVLQQVGWKLAQLADTIGVEFEFRGFVANSIADIDVSMLDIRAPDTEVVAVNSVFEVHRLLARPGAVEKVLSSITGMKPKIVTLVEQESNHNGAVFMERFNEALHYYSTMFDSLESSALTLPNNQDDLVMSEVYLGRQICNVVACEGTERVERHETLTQWRVRMNLAGFEPVHLGSNAFKQASMLLALFAGGDGYKVEENDGCLM

SEQ ID NO: 3910 - protein, 365 aa, Oryza sativa (japonica cultivar-group)
MAKQSCCHKKKLRRGLWSPEEDEKLMNHIAKYGHGCWSSVPKLAGLERCGKSCRLRWINYLRPDLKRGTFSQEEEDLIIQLHSMLGNKWSQIAAQLPGRTDNEVKNFWNSYIKKKLRDRGIDPATHKPLAADSSATPTNTTAAAASRSTATCRAVFSDAELQIPTAAAVQQQQQAPLVGAMQLVDGIKMPLDDYWPAAAAAAAPSSSTTTFSAYHHALSMQQQAAAGCGAAAAFDMDALSHCGVVVAPSASSSSTLTSMAGLSPAAADAAEQSANVAAAAAATTTNLPWLDLGHANPIATMDHYAGVLDELRWSDYFDGAYQAATTATQGGALQGQCLYDGGGGGGKDVDDAVQFVDVHSLSNWC

SEQ ID NO: 3911 - protein, 132 aa, Wisteria floribunda
KDRHSKINTARGLRDRRMRLSLEVAKRFFGLQDMLGFDKASKTVECLLTQAKVEIKQLAREKNISIHPSCSSVGAKSASSTSECEGVSGLDEVVVSGNQEHAVVKRRLTKVSRKSAFSPVGREKARARARER

SEQ ID NO: 3912 - protein, 137 aa, Calycadenia multiglandulosa
MKRPRERKKEAKASTSSSSSMAPAAKAKDLQNPPDSGGMDELLEVLGYKVKSTDMDDVAQKLEQLEMVMGEDGILQLSDTVHYNPSDLSGWVQSMLSELNNSGGDSDIGIGIPAGGESSTTMIDFSNNKEKQPEDPY

SEQ ID NO: 3913 - protein, 180 aa, Brassica napus
MDLTGEFEARSYGGGATREATRLESLHLGDEFRQLALPPENAGGFTALLELPPTQAVNLLRFTDSPSSSSQAAAVTGIAPTPPLHSYGTLTFPSNSLVMERAARFSTEHQQNGNVSGTSSVPSNSSVKTEPAETDSSQAVNNRSGKRKDSDKKAKSSTKKKKNTSSEENEKLPYVHVRAR

SEQ ID NO: 3914 - protein, 226 aa, Thalictrum dioicum
MGRGKIEIKRIENTTNRQVTFCKRRNGLLKKAYELSVLCEAEVALIVFSSRGRLYEYSNNSVKKTIERYKKASTDSPNSGSVSEANVQFYQQEASKLHNQIASLQNHNRNLLGESLSNLNIKELRQIEKKIEGGISKIRAKKNELLFAEVEYMQKREIDLQTDNKYLRAMIAANERAPPEHMNLMPANEYHIMSSAPFDSRNFLPANLLDHNNNYSRSDQTTLQLG

SEQ ID NO: 3915 - protein, 199 aa, Anemone nemorosa
QGIIKKAQELTVLCDAEVSLIMFSSTGKCTSYISPNISPKEFYDKYQQAAGIDLWQSQYQEMHNTLRKLKEINSKLRREIRVRVGEDDLKELDFDELHGLEQHLENSHKIVHQRKFSQLTTHTETTRKKIRNHEEIHNNLMQDCQQKFEEEYALANPQGISSLEMATDGAGGSHIFAFRMHPGHQDVHGDYDFHQLRLA

SEQ ID NO: 3916 - protein, 385 aa, Oryza sativa (japonica cultivar-group)
MLLSGPSPQQPTPPLLLPESSGEDGGHDSSSRAAASGGGGGPKKRAETWVQDETLCLIALRREMDSHFNTSKSNKHLWEAISARMREQGFDRSPTMCTDKWRNLLKEFKKARSHARGGGGGGVGGGGAGTGGGNCPAKMACYKEIDDLLKRRGKPTGGGGAAVGSGAVKSPTVTSKIDSYLQFDKGFEDASIPFGPVEASGRSLLSVEDRLEPDSHPLALTADAVATNGVNPWNWRDTSTNGGDNQVTFGGRVILVKWGDYTKRIGIDGTADAIKEAIKSAFGLRTRRAFWLEDEDEVVRSLDRDMPVGTYTLHLDTGMTIKLYMFENDEVRTEDKTFYTEEDFRDFLSRRGWTLLREYSGYRIADTLDDLRPGVIYEGMRSLGD

SEQ ID NO: 3917 - protein, 426 aa, Arabidopsis thaliana
MDLTGGFGARSGGVGPCREPIGLESLHLGDEFRQLVTTLPPENPGGSFTALLELPPTQAVELLHFTDSSSSQQAAVTGIGGEIPPPLHSFGGTLAFPSNSVLMERAARFSVIATEQQNGNISGETPTSSVPSNSSANLDRVKTEPAETDSSQRLISDSAIENQIPCPNQNNRNGKRKDFEKKGKSSTKKNKSSEENEKLPYVHVRARRGQATDSHSLAERARREKINARMKLLQELVPGCDKGTDFGGKIKIKVCFGVHLLMISGKKVAIFLWKVSCEDLIDCSFSPPRIQGTALVLDEIINHVQSLQRQVEMLSMRLAAVNPRIDFNLDTILASENGSLMDGSFNAAPMQLAWPQQAIETEQSFHHRQLQQPPTQQWPFDGLNQPVWGREEDQAHGNDNSNLMAVSENVMVASANLHPNQVKMEL

SEQ ID NO: 3918 - protein, 285 aa, Zea mays
MSCAGQAGGWLLDYALVEEEIQGSEFIYMVDDPAVSSVILGFDAPRKEDGVQDNPGAKKRQSFSSSFLSVDPQHKRKSVHITLSPILLPLKSVGIICCAFLFPFLLRRSRPESSAPPGTKACREKLRRDRLNERFNELCAILEPGKPPKADKVAILSDAARLLNQLQGEAQKLKQSNESLQESIKSLKAEKSELRDEKTRLKAEKERLEQMLKGVVSHAAVAAPGPFVPHPAAVAPSFHHHPAAFAQAGKFVPYPSYPPPAAFWQWIPPTSLDTTKDPAHWPPVA

SEQ ID NO: 3919 - protein, 647 aa, Oryza sativa (indica cultivar-group)
MDKKNSKRTRLRFHPDPLFLHDAINHSIHLGDEPIEDTSIPFQHDILGNKEDEGVESSPKVIRQLPESDKRGDKKWDSSIRSTTILMQLQIWTCWCANVERLRKNLIWMASQWRAERIKQQIKVHFCANRLAHRKLFVASLSFEKDMTGNKSFMEPRFFGPKVLRQAKHPMRHAVHHFFTFLFDYKYSVIRVLQNENDVGHVFRALAKFKSLLLDVVRKKRAPTRGGGGKKYAIGYCSRPEKSKKRIASFMKLLRFNWAAAAAVTPARAKDLELHYHPYYYDYDDSTWNVVVPADGAAEELRGGGGDDGEDCGYLCWLEEETSAGALPAAGEGEDGGNGNGDGDGNGAVNEIDRLAERFIARCHAKFLLEKQESYRRYQEMMARSITIGCPFGEGCHFSHFVPGGYQAVAKTLNLGNPAVPAPARAPMDHAAGGNSHPASSGKTRMCTKYNTAEGCKFGDKCHFAHGERELGKPAYMSHESAMAPPMGGRYGGRPEPPPPAAMGPPAGNFGASATAKISVDASLAGGIIGKGGVNTKQICRVTGVKLSIRDHESDSNLKNIELEGNFDQIKQASNMVGELIATISPSTPAKKPAGSAAGAAPAGRGGPGGRSNYKTKLCENFVKGTCTFGDRCHFAHGENEQRKGAA

SEQ ID NO: 3920 - protein, 227 aa, Silene latifolia subsp. alba
MARRKIQIKKIENLTNRQVTYSKRRNGLFKKANELTVLCDATVSIIMLSSNLKLHEFLSPGSNLTTKDVYDRYQKALGVDIWVTHEKRMQDDLQKLNELNRKLQTDIRQRMGDCLEDLSFEELCRLGQEMQEAVTLIRERKYKKIDNQIDTTKKKVRNGQEVHKGLLQEFEIPKDEPPYGLVDNGDYSNVMGYNDASRVLALRLQPCQPNLHAGAGSGSCVTTYALL

SEQ ID NO: 3921 - protein, 173 aa, Arabidopsis thaliana
MEYWSSSFIDGASSSSFISPFYNFDHFSESGYGEESNSFNGQEKKKKKMTSEQLKFLERSFQEEIKLNPDRKMKLNPDRKMKLSKELGLQPRQIAVWFQNRKARWKNKQLEHLYESLRQEFDIVSREKELLQEEVITPVINTNLINKLSSYNPLSYFHFVSTANTTEINDKRG

SEQ ID NO: 3922 - protein, 223 aa, Sorghum bicolor
IENKISRQVTFAKRRNGLLKKAYELSLMCDAEVALIIFSGRGRLFEFSSSSCMYKTLERYRSSNYSSQEVKVPLDSEINYQDYLKLRTRVEFLQTTQRNILGEVLGPLSMKELEQLENQIETSLKQIRSRENQMLLDQLFDLKSKEQELQDLNKDLRKKLQETSPENALHVSSWEEGGHSGASGNVLDPYQGLLQHPESDPSLQIGYHQQAYMDQLNNEDMAG

SEQ ID NO: 3923 - protein, 246 aa, Silene latifolia subsp. alba
MGRGRVQLKMIENKINRQVTFSKRRSGIIKKAHEISVLCDAEVALIIFSHRGKLFDFASDSCMEKILERYERYCYAEKQLASNDPDAQVNWTFDYAKLKAKLDLLQRNHRQYLGQDLDALNLKELQSLEQQLDVGLKHIRSKKNQLMHDSISELQKKERSMEEQNKMLTKKIKEKGKAATTETQQMQWQQQQQNHQDVATSSDYLIHPPVPLNMSNSYEKEQGGEGSRNDLNLTLESNCWAHHSLF

SEQ ID NO: 3924 - protein, 296 aa, Glycine max
MAFPPSHTFMFQTHEDHDPHQLHLRSTSTSLNAFPSFPPHHFQGGGAGAGGFMMKRSMSFSSIEKNNHKNKCDEVHGDDELSDEGSQLLGEKKKRLSQEQVKGLEKSFELGNKLEPERKMQLAKALGLQPRQISIWFQNRRARWKTKQLEKEYEVLKKLFEAVKADNDSLKAQNQKLHTELQTLKRRDCNETGTVISLKKETDQGSWSNGSNNSSEINLDLSRTPVMNTSPVSSQNGKSLLPTTSSKPTSITQLLQCSSRPDLQDESFCNMFHIIDEQQNFWPWPDHQQQQQHQFH

SEQ ID NO: 3925 - protein, 257 aa, Silene latifolia subsp. alba
MGRGRVQLKRIENKINRQVTFSKRRTGLLKKAHEISVLCDADVGLIVFSTKGKLFEYATDSCMEKILERYERYSYAERQLTAPDPDSHVSWTLEHAKLKARLEILQKNHRHYMGEDLDTLSLKELQNFEHQLDTALKHIRSKKNQLMYESIHELQKKDKALQEHNNTLSKKVKEKEKEKEKEKAIADQQAQWVQQNQELNPSAFFSSQVLPALNIRGNYETGSSVIVNEVAQTQNRSNSSNNNSLVPSWMLNHLAEQ

SEQ ID NO: 3926 - protein, 265 aa, Zea mays
MGRGRIEIKRIENNTSRQVTFCKRRNGLLKKAYELSVLCDAEVALVVFSSRGRLYEYANNSVKATIERYKKAHAVGSSSGPPLLEHNAQQFYQQESAKLRNQIQMLQNTNRHLVGDSVGNLSLKELKQLESRLEKGISKIRARKSELLAAEINYMAKRETELQNDHMNLRTKIEEGEQQLQQVTVAQSVAAAAATDVELNPFLEMDTKCFFPGGPFATLDMKCFFPGSLQMLEAQQRQMLATELNLGYQLAPPDTDVANNNPQQF

SEQ ID NO: 3927 - protein, 540 aa, Calycadenia multiglandulosa
ERKKEAKASTSSSSSMAPAAKAKDLQNPPDSGGMDELLEVLGYKVKSTDMDDVAQKLEQLEMVMGEDGILQLSDTVHYNPSDLSGWVQSMLSELNNSGGDSDIGIGIPAGGESSTTMIDFSNNKEKQPEDPYDLRAIAGGAIYGEGSESSGNGIKRMKMKSTAEGSGAVDVPPESPPRPVVLVDSQEAGIRLVHTLMACAEAVQNNDMKLAEALVKHVGILVASQAGAMAKVATYFAGALAQRIYKIYPQDGGLETSCWEILQMHFYESCPYLKFAHFTANQAILEAFAGAARVHVIDFSLNQGMQWPALMQALALRPGGPPAFRLTGIGPPQPDNTDALQQVGWKLAQLADTIGVEFEFRGFVAASIADIDAAMLDIRLDEVVAVNSVFELHRLLARPGAVEKVLSSITSMKPKIVTLVEQESNHNGVVFMDRFNEALHYYSTMFDSLESSALTQPNSQQDLVMSEVYLGRQICNVVACEGPDRVERHETLTQWRTRMISAGFEPVHLGSNAFKQASMLLALFAGGDGYRVEENDGCLM

SEQ ID NO: 3928 - protein, 380 aa, Anisocarpus madioides
MKRSRERKKEASSVPDSGGMDELLEVLGYKVKSTDMADVAQKLEQLEMVMGEDGILQLSDTVHYNPSDLSGWVQSMLLVLNDNNTTTTADDSGHILLPGDSSTTMIDFSSETVVHGKPGSKIHQDDDLRAIAGGAIYRSESESSMPGNANPNGNGVKRMKTTAAGSEVVDVQPESPRPVVLVDSQEAGIRLVHTLMACAEAIQHNDLKLADALVKHVGILVASQAGAMAKVATYFAGALAQRIYNIYPQNALETSCYEILQMHFYETCPYLKFAHFTANQAILEAFAGAKRVHVIDFSLNQGMQWPALMQALALRSGGPPAFRLTGIGPPQPDNSDALQQVGWKLAQLADTIGVEFEFRGFVANSIADIDANMLDIRLPE

SEQ ID NO: 3929 - protein, 143 aa, Anisocarpus madioides
RPGAVEKVLSAITKMKPKIVTLVEQESNHNGALFMERFNEALHYYSTMFDSLESSALTLPNSPDDLVMSEVYLGRQICNVVACEGTDRVERHETLTQWRVRMNSAGFEPVHLGSNAFKQASMLLALFADGDGYRVEENDGCLM

SEQ ID NO: 3930 - protein, 542 aa, Argyroxiphium sandwicense subsp. macrocephalum
MKRSRERKKEAKTTSSVPDSGGMDELLEVLGYKVKSTDMADVAQKLEQLEMVMGEDGILQLSDTVHYNPSDLSGWVQSMLLVLNDNNNNTAHDSGHILLPGDSSTTMIDFSSEIVVHGKPGSKIHLDDDLRAIAGGAIYRSESESSMPGNGNPNENGVKRMKTTAAGSEVVDVQPESPRPVVLVDSQEAGIRLVHTLLACAEAIQHKDLKLADALVKHVGILVASQAGAMAKVATYFAGALAQRIYNIYPQNALETSCYEILQMHFYETCPYLKFAHFTANQAILEAFADATRVHVIDFSLNQGMQWPALMQALALRSGGPPAFRLTGIGPPQPDNSDALQQVGWKLAQLADTIGVEFEFRGFVANSIADINANILDIRAPETEVVAVNSVFEVHRLLARPGAVEKVLSSITGMKPKIVTLVEQESNHNGNVFMERFNEALHYYSTMFDSLESSALTLPNSQDDLVMSEVYLGRQICNVVACEGTDRVERHETLTQWRVRMNSAGFEPVHLGSNAFKQASMLLALFADGDGYRVEENDGCLM

SEQ ID NO: 3931 - protein, 541 aa, Argyroxiphium sandwicense subsp. macrocephalum
MKRSRERKKEAKTTSSVPDSGGMDELLEVLGYKVKSTDMADVAQKLEQLEMVMGEDGILQLSDTVHYNPSDLSGWVQSMLLVLNDNNNTAHDSGHILLPGDSSTTMIDFSSEIVVHGKPGSKIHLDDDLRAIAGGAIYRSESESSMPGNGNPNENGVKRMKTTAAGSEVVDVQPESPRPVVLVDSQEAGIRLVHTLLACAEAIQHKDLKLADALVKHVGILVASQAGAMAKVATYFAGALAQRIYNIYPQNALETSCYEILQMHFYETCPYLKFAHFTANQAILEAFADATRVHVIDFSLNQGMQWPALMQALALRSGGPPAFRLTGIGPPQPDNSDALQQVGWKLAQLADTIGVEFEFRGFVANSIADIDANILDIRAPETEVVAVNSVFEVHRLLARPGAAEKVLSSITGMKPKIVTLVEQESNHNGNVFMERFNEALHYYSTMFDSLESSALTLPNSQDDLVMSEVYLGRQICNVVACEGTDRVERHETLTQWRVRMNSAGFEPVHLGSNAFKQASMLLALFADGDGYRVEENDGCLM

SEQ ID NO: 3932 - protein, 255 aa, Prunus persica
MGRGRVQLKRIENKINRQVTFSKRRSGLLKKAQEISVLCDAEVALIVFSTKGKLFEYSTDSCMERILERYERYSYSEKQLLANDHESTGSWTLEHAKLKARVEVLQRNCSHFMGEDLQSLSLKELQNLEQQLDSALKHIRSRKNQVMYESISELQKKDKALQEQNNLLAKKVKEKEKALAPQAESWEQQVQNQGLDCSSTLLPEALQSLNFGSGSNYQGIRNDGSGGDHEDENETPTANRPNTLLPPWMLRHLNE

SEQ ID NO: 3933 - protein, 358 aa, Arabidopsis thaliana
MEGSSSTIARKTWELENSILTVDSPDSTSDNIFYYDDTSQTRFQQEKPWENDPHYFKRVKISALALLKMVVHARSGGTIEIMGLMQGKTDGDTIIVMDAFALPVEGTETRVNAQDDAYEYMVEYSQTNKLAGRLENVVGWYHSHPGYGCWLSGIDVSTQTLNQQHQEPFLAVVIDPTRTVSAGKVEIGAFRTYSKGYKPPDEPVSEYQTIPLNKIEDFGVHCKQYYSLDVTYFKSSLDSHLLDLLWNKYWVNTLSSSPLLGNGDYVAGQISDLAEKLEQAESHLVQSRFGGVVPSSLHKKKEDESQLTKITRDSAKITVEQVHGLMSQVIKDELFNSMRQSNNKSPTDSSDPDPMITY

SEQ ID NO: 3934 - protein, 224 aa, Thalictrum dioicum
MGRGKIEIKRIENKTNRQVTYSKRRAGILKKANELNVLCDAQVAMIMFSSTDKLTEFVSPNTTMKKTFDMYQLASGCNLWDSHYDKMQEALKKQKEINKKLRKEIGQRVGGDDLSDMSFEELCGLEQHLDSSVKIVSQRKYSQITTQTQTSKTKLKNLAQMHNNLLHEFEEKLEGEYALADHEGLSALEMAANGASHVFAFRLQSSQPNLHGDGGYGFEGLRLG

SEQ ID NO: 3935 - protein, 208 aa, Thalictrum dioicum
MGRGKIEIKRIENPTNRQVTYSKRRAGIVKKAKELTVLCDTQVSLIMISTSGKIHEYISPSCTHKNLYDKYQQASGINIWQPQYERMQDNLQKLKEINNKLRKEIRQRNGEDLDELNFQQLCGLEQNMQKSVDCVRNRKFHVISSQTDIFKKKVKNHQVTYNSLLRGFEERDADCQYASPDFEGDYQSTIEFATENPHIFAFRLQPQL

SEQ ID NO: 3936 - protein, 226 aa, Thalictrum dioicum
MGRGKIEIKKIENITNRQVTFSKRRAGIVKKAKELTVLCDAEVSLLMVSSTGKIHEYISPSSTHKNIYDRYQQASGTNLWQPHYERMQETLQKLKETNNKLRKEIRQRNGEDLDELNFQQLCGLEQNMEKSVECVRNRKFHVITTSSDTLKKKMKNHEETYNSLLRQFEERDADFRFPSLDFEGDYQSTIEFANGNPQIFAFRLQPRLQSNLQDEEAYGSYGLSLA

SEQ ID NO: 3937 - protein, 200 aa, Nicotiana tabacum
MAFAGTTQKCMACDKTVYLVDKLTADNRIYHKACFRCHHCKGTVKLGNYNSFEGVLYCRPHFDQLFKQTGSLDKSFEGTPKIVKPQKPIDSEKPQVAKVTSMFGGTREKCFGCKKTVYPTEKVSANGTPYHKSCFQCSHGGCVISPSNYTAHEGRLYCKHHHIQLIKEKGNLSKLEGDHEMNSTTTTEVTAESYTADQVD

SEQ ID NO: 3938 - protein, 289 aa, Capsella rubella
MMLEKDDLGLSLGLNYPKKQMNLNSNPSVSVTPSSSSFGLLRRSSLNESFTSSVPNSDSSQKETRTFIRGIDVNRPPSTAEYGEEDAGVSSPNSTVSSSTGKRSEREEDTDPQGSRGGISDDEDGDNSRKKLRLSKDQSAILEETFKDHSTLNPKQKQALAKQLGLRARQVEVWFQNRRARTKLKQTEVDCEFLRRCCENLTEENRRLQKEVTELRALKLSPQFYMHMSPPTTLTMCPSCEHVSAPPPQQPPQAATSAQHHRGSLPVNAWAQGTRISHGLTFDALRPRS

SEQ ID NO: 3939 - protein, 203 aa, Thalictrum thalictroides
KRRNGLLKKAYELSVLCEAEVALIVFSSRGRLYEYSNNSVKKTIERYKKASTDSPNSGSVSEANVQFYQQEASKLRNQIASLQNHNRNLLGESLSNLNIRELKQIEKKIEGGISKIRAKKNELLFAEIEYMQKREIDLQTDNKYLRAMIAANERAPEHMNLMPANEYHVMSSAPFDSRNFMPANLLDHNNNYCRSDQTTLQLG

SEQ ID NO: 3940 - protein, 129 aa, Ligustrum ovalifolium
CTAKGIRDRRMRLSVQVARKFFDLQDMLGYDKASKTIDWLFTKSKKAIKELTKNHHQAKISSGNDNVKSECFVSGCEVALAIEENSKNEFKGVSATSVSPGNRHEKDDHLNYICKVVGKPKPNTRESRD

SEQ ID NO: 3941 - protein, 224 aa, Cycas edentata
MGRGKIEIKRIENTTNRQVTFCKRRNGLLKKAYELSVLCDAEVALIVFSSRGRLYEFANNSVKRTIERYKKTCADNTQGGAISESNSQYWQQEAGKLRQQIDILQNANRHLMGDALTSLSVKELKQLEIRLERGLSRVRSKKNEMLLEEIEIMQRREHILLAENQFLRTKIAEYESNQNTNVLIPGPEFDALPAFDSRNFLHANLIEAAAHHYTQQDQAALQLG

SEQ ID NO: 3942 - protein, 236 aa, Oryza sativa (japonica cultivar-group)
MTTRPDGGGGGGGAPDKQLVPASNANGTALAVRKPPSKDRHSKVDGRGRRIRMPIICAARVFQLTRELGHKSDGQTIEWLLRQAEPSIIAATGTGTTPASFSTSSPSSLRSNSTSNSNDLLLPRAAPFILGKRLRAADDHTTSPAPAPDATAPTQAFWALPARADFGQLWSFAAAPEMMVAAAAAPAMPGEASAARVGNYLPMAQGNLNLLASFSGGPGGAGATAATGRPEEESAR

SEQ ID NO: 3943 - protein, 1768 aa, Helicobacter pylori
MNEENDKLETSKKTQQHSPQDLSNEEATEANHFEDSSKESKESSDHYLDNYTETKTNFDEYELEETQTQMDSGGNETSESSNGSLADKLFKKARKLVDNKRPFTQQKNLDEEIQEPNEEDDQENNGYQEETQIDLIDDETSKKTQQHSPQDLSNEEATEANHFEDSSKESKESSDHYLDNPTETKTNFDEYKSEEITNDSNDQEIIKGSKKKYIIGGIVVAVLIVIILFSRSIFHYFIPLEDKSSRFSKDRNLYVNDEIQIRQEYNRLLKERNEKGNMIDKNLFFNDDPNRTLYNYLNIAEIEDKNPLRAFYECISNGGNYEECLKLIKDKKLQDQMKKTLEAYKDCIKNAKTEEERIKCLDLIKDENLKKSLLNQQKVQVALDCLKNAKTDEERNECLKLINDPEIREKFRKELGIQKELQEYKDCIKNAKTEAEKNECLKGLSKEAIERLKQQALDCLKNAKTDEERNECLKNIPQDLQKELLADMSVKAYKDCVSRARNEKEKKECEKLLTPEAKKKLEQQVLDCLKNAKTDEERKKCLKDLPKDLQSDILAKESLKAYKDCVSQAKNEAEKKECEKLLTPEAKKLLEEEAKESVKAYLDCVSQAKTEAEKKECEKLLTPEAKKKLEEAKKSVKAYLDCVSQAKTEAEKKECEKLLTPEAKKLLEQQALDCLKSAKTDEERKKCLKDLPKDLQKKVLAKESVKAYLDCVSQAKTEAEKKECEKLLTPEAKKLLEEAKESLKAYKDCVSRARNEKEKKECEKLLTPEAKKLLEEEAKESVKVYLDCVSQARTEAEKKECEKLLTPEARKKLEEAKKSVKVYLDCVSQARTEAEKKECEKLLTPEARKLLEQEVKKSVKAYLDCVSRARNEKEKQECEKLLTPEARKKLEEAKKSVKVYLDCVSQARTEAEKKECEKLLTPEARKLLEQEVKKSVKAYLDCVSRARNEKEKKECEKLLTPEAKKFLEQQALDCLKNAKTETEKKRCVKDLPKDLQKKVLAKESVKAYVDCVSRARNKKERKACEKLLTPEAKKLLEEAKESLKAYKDCLSQARNEEERRACEKLLTPEARKLLEQEVKKSVKAYLDCVSRARNEKEKKECEKLLTPEARKFLAKQVLSCLEKARNEEEKKACLKNLPKDLQENVLAKESLKAYKDCLSQARNEEERRACEKLLTPEARKLLEQEVKKSVKAYLDCVSRARNEKEKKECEKLLTPEARKFLAKELQQKDKAIKDCLKNADPNDRAAIMKCLDGLSDEEKLKYLQEAREKAVLDCLKTARTDEEKRKCQNLYSDLIQEIQNKRTQSKQNQLSKTERLHQASECLDNLDDPTDQQAIEQCLEGLSDSEKALILGIKRQADEVDLIYSDLRNRKTFDNMAAKGYPLLPMDFKNGGDIATINATNVDADKIASDNPIYASIEPDITKQYETEKTIKDKNLEAKLAKALGGNKKDDDKEKSKKSTAEAKVESNKIDKDVAETAKNISEIALKNKKEKSGEFVDENGNPIDDKKKTEKQDETSPVKQAFIGKSDPTFVLAQYTPIEITLTSKVDATLTGIVSGVVAKDVWNMNGTMILLDKGTKVYGNYQSVKGGTPIMTRLMIVFTKAITPDGVIIPLANAQAAGMLGEAGVDGYVNNHFMKRIGFAVIASVVNSFLQTAPIIALDKLIGLGKGRSERTPEFNYALGQAINGSMQSSAQMSNQILGQLMNIPPSFYKNEGDSIKILTMDDIDFSGVYDVKITNKSVVDEIIKQSTKTLSREHEEITTSPKGGN

SEQ ID NO: 3944 - protein, 203 aa, Glycine max
MDCSSVLHSSNSSFFPFNENDPEEMLLYGMITSYQEKVIIKEEEVNSEENNNKNKKNNNKSSFRGVRSRPWGKFAAEIRDSTRHGVRVWLGTFDSAEAAALAYDQAAFSMRGSAAVLNFPVEKVKESLRDMNCTLSQLDGSSPVVALKRRHSLGRKMAAKKKKVEETHGDVRLENVVVLEDLGAEYLEHLLMMSSHDTTSCSW

SEQ ID NO: 3945 - protein, 257 aa, Medicago truncatula
MSNPDGTTTTTTTTNGSIIDPNRQQLAVKKPPAKDRHSKVDGRGRRIRMPIICAARVFQLTRELGHKSDGQTIEWLLRQAEPSIIAATGTGTTPASFSSLSVSLRGSSNSLPSPSSTSLDHKPLLSPTPFILGKRIRTDDDSSSSSAKDDALSVGSLSTPAALWALPARPDFGQIWSFAAAAAGAPPPEMMVQSLSQQQHQVQANFFAHHHQQQQHQQAMGEASAARVGNYLPGHLNLLASLSGGHGNSGRRDDEHH

SEQ ID NO: 3946 - protein, 143 aa, Zea mays
  misc_feature (50)..(50): Xaa can be any naturally occurring amino acid
AGHGGNRHGLKEVLAGDDERGCSRREALQSLDASLAGGIIDKGGVNTKQXTSVKLSIRDHESNHNLKNIELEGNFDQIKQASDLLRDLIATISASMPAKNPSSAVAPAGGGRGSGPGGTSSNYKTKLCENFLKLCENFQHDYV

SEQ ID NO: 3947 - protein, 244 aa, Triticum aestivum
GDEQQQQQIAAAAAKKGGGKRGRREMRRIEDATSRQVTFSKRRSGLLKKAFELGVLCDAEVALIVFSPRGRLYEYASAPDLQKTIDRYLNHTKGTSANEKTVEQPAAGVQMCRSEATALKHKIDAIEAYQRKLSGEGLGSCSAHELQELELQLEKSLSCIRQKKQQKMVAKISELKEKERKLLTENSVLREEYKALPLLELATAAAAERSPDGAGVEEAEEDEWRRHYMEVETELVIGRPGSSS

SEQ ID NO: 3948 - protein, 251 aa, Arabidopsis thaliana
MPTLYKKAGCQFQLTTMEEGDFFNCCFSEISSGMTMNKKKMKKSNNQKRFSEEQIKSLELIFESETRLEPRKKVQVARELGLQPRQVAIWFQNKRARWKTKQLEKEYNTLRANYNNLASQFEIMKKEKQSLVSELQRLNEEMQRPKEEKHHECCGDQGLALSSSTESHNGKSEPEGRLDQGSVLCNDGDYNNNIKTEYFGFEEETDHELMNIVEKADDSCLTSSENWGGFNSDSLLDQSSSNYPNWWEFWS

SEQ ID NO: 3949 - protein, 297 aa, Oryza sativa (japonica cultivar-group)
VVFSNLHSPPIDQLTARSSPLQIFRSVDRLINMGRGKIEIKRIENKTSRQVTFCKRRNGLLKKAYELAILCDAEIALIVFSSRGRLYEFSNVNSTRSTIERYKKASASTSGSAPVIDVNSHQYFQQEAAKMRHQIQTLQNANRHLIGESIGNMTAKELKSLENRLEKGISRIRSKKHELLFSEIEYMQKREADLQNENMFLRAKVAEAERAEHDDQQAAEDDEMAPAPAVGGGSSSGTELEALPATFDTREYYQPAPPVSMLAAAAAAAAAQYSSDHHQTALHLGYFKVDSGKGGLL

SEQ ID NO: 3950 - protein, 542 aa, Argyroxiphium kauense
MKRSRERKKEAKTTSSVPDSGGMDELLEVLGYKVKSTDMADVAQKLEQLEMVMGEDGILQLSDTVHYNPSDLSGWVQSMLLVLNDNNNNTAHDSGHILLPGDSSTTMIDFSSEIVVHGKPGSKIHLDDDLRAIAGGAIYRSESESSMPGNGNPNENGVKRMKTTAAGSEVVDVQPESPRPVVLVDSQEAGIRLVHTLLACAEAIQHNDLKLADALVKHVGILVALQAGAMAKVATYFAGALAQRIYNIYPQNALETSCYEILQMHFYETCPYLKFAHFTANQAILEAFADATRVHVIDFSLNQGMQWPALMQALALRSGGPPAFRLTGIGPPQPDNSDALQQVGWKLAQLADTIGVEFEFRGFVANSIADIDANILDIRAPETEVVAVNSVFEVHRLLARPGAVEKVLSSITGMKPKIVTLVEQESNHNGNVFMERFNEALHYYSTMFDSLEGSALTLPNSQDDLVMSEVYLGRQICNVVACEGTDRVERHETLTQWRVRMNSAGFEPVHLGSNAFKQASMLLALFADGDGYRVEENDGCLM

SEQ ID NO: 3951 - protein, 544 aa, Argyroxiphium kauense
MKRSRERKKEAKTTSSVPDSGGMDELLEVLGYKVKSTDMADVAQKLEQLEMVMGEDGILQLSDTVHYNPSDLSGWVQSMLLVLNDNNNNNNTAHDSGHILLPGDSSTTMIDFSSEIVVHGKPGSKIHLDDDLRAIAGGAIYRSESESSMPGNGNPNENGVKRMKTTAAGSEVVDVQPESPRPVVLVDSQEAGIRLVHTLLACAEAIQHNDLKLADALVKHVGILVALQAGAMAKVATYFAGALAQRIYNIYPQNALETSCYEILQMHFYETCPYLKFAHFTANQAILEAFADATRVHVIDFSLNQGMQWPALMQALALRSGGPPAFRLTGIGPPQPDNSDALQQVGWKLAQLADTIGVEFEFRGFVANSIADIDANILDIRAPETEVVAVNSVFEVHRLLARPGAVEKVLSSITGMKPKIVTLVEQESNHNGNVFMERFNEALHYYSTMFDSLEGSALTLPNSQDDLVMSEVYLGRQICNVVACEGTDRVERHETLTQWRVRMNSAGFEPVHLGSNAFKQASMLLALFADGDGYRVEENDGCLM

SEQ ID NO: 3952 - protein, 229 aa, Triticum aestivum
MGRGKIEIKRIENATNRQVTYSKRRSGIMKKARELTVLCDAQVAIIMFSSTGKYHEFCSTGTDIKGIFDRYQQAIGTSLWIEQYENMQRTLSHLKDINRNLRTEIRQRMGEDLDALEFEELRDLEQNVDAALKEVRQRKYHVITTQTETYKKKVKHSQEAYKNLQQELGMREDPAYGFVDNPAAGGWDGVAAVAMGGGSAADMYAFRVVPSQPNLHGMAYGGSHDLRLG

SEQ ID NO: 3953 - protein, 136 aa, Dubautia arborea
MKRSRERKKEAKTTSSVPDSGGMDELLEVLGYKVKSTDMADVAQKLEQLEMVMGEDGILQLSDTVHYNPSDLSGWVQSMLLVLNDNNNNNTAHDSGHILLPGDSSTTMIDFSSEIVVHGKPGSKIHLDDDLRAIAG

SEQ ID NO: 3954 - protein, 247 aa, Helianthus annuus
SYMSSCPFKKNEIFFANKTIYEAALSSSTLHIVDFGIAYGFQWPILIKHLGDRPGGPPKLRITGIEFPQPGFRPAEWVEETGRRLATYCERFKVPFEIHNAIAIQNWEMINIDDLKLQRNEFLAVNALARFENLLDETMVTGSSPRDAVLKLVRDMKPDIFVHSIVNGSYSAPFFVTRFREALFHYSALFDMLDATIERENEQRQSYEGEFHGRQVMNVIACEGPQRVERPETYKQWQVRITRAGSN

SEQ ID NO: 3955 - protein, 534 aa, Dubautia arborea
ERKKEAKTTSSVPDSGGMDELLEVLGYKVKSTDMADVAQKLEQLEMVMGEDGILQLSDTVHYNPSDLSGWVQSMLLVLNDNNTNNTAHDSGHILLPGDSSTTMIDFSSEIVVHGKPGSKIHLDDDLRAIAGGAIYRSESESSMPGNGNGVKRMKTTVAGSEVVDVQPESPRPVVLVDSLEAGIRLVHTLMACAEAIQHNDLKLADALVKHVGILVASQAGAMAKVATYFAGALAQRIYNIYPQNALETSCYEILQMHFYETCPYLKFAHFTANQAILEAFAGATRVHVIDFSLNQGIQWPALMQALALRSGGPAAFRLSGIGPPQPDNSDALQQVGWKLAQLADTIGVEFEFRGFVANSIADIDANILDIRAPETEVVAVNSVFEVHRLLARPGAVEKVLSSITGMKPKIVTLVEQESNHNGNVFMERFNEALHYYSTMFDSLESSALTLPNSQDDLVMSEVYLGRQICNVVACEGTDRVERHETLTQWRVRMNSAGFEPVHLGSNAFKQASMLLALFADGDGYRVEENDGCLM

SEQ ID NO: 3956 - protein, 282 aa, Zea mays
LELSQVTGSQHTATPKPQAPPGPGSLLRPISSKSNKHLWEAISARMRDQGFDRSPTMCTDKWRNLLKEFKKARSHSRNSGGGSGSGGNGNAKMAYYKEIDDLLKRRGKATGSGTAGCVGSSAGKSPKSNCKIDSYLQFTTDNGFEDANIPFGPVEANGRTILSIDDRLEDDRHQLPLTAADAVATNGVNPWNWRDTSTDGGDNRGNFGGRVILVKWGDYTKRIGIDGTPEAIKEAIKSAFGLRTRRAFWLEDEDEVVRTLDRDMPVGTYTLNLDDGTCELSS

SEQ ID NO: 3957 - protein, 203 aa, Thalictrum thalictroides
KRRNGLLKKAYELSVLCEAEVALVVFSNRGRLYEYANNSVRKTIDRYKKTCGEGSSTLTVSEANLLFYQQESSKMKQQIEILQNSNRHLMGEALSRLSIKELKQLESRLEKGLSRIRSKKNETLLAEIEYMQKREIELHNDNIYLREQITANERAQQHMNSLPGNVYEAITSAPHSSRDFFQVNLRDSKPNQYCSDATVLQLC

SEQ ID NO: 3958 - protein, 256 aa, Silene latifolia
MGRGRVELKRIENKINRQVTFAKRRNGLLKKAYELSVLCDAEVALIIFSNRGKLYEFCSGPSSMLKTLERYQKCSYGAVEVNKPSKELESSYKEYLKLKARYESLQRAHRNLLGEDLGPLNVKELDQLERQLESSLKQIRCIKTQSMLDQLTDLQSKEHALMEANKSLKAELERIMVKDNQVRQSWEGHHEHQNVHYEHQHAHSQHQHAHSQGLFQPIDCNPNLHLGYNAETSDHQLTAGTSHAQVPGFLPGWMQM

SEQ ID NO: 3959 - protein, 537 aa, Dubautia knudsenii
ERKKEAKTTSSVPDSGGMDELLEVLGYKVKSTDMADVAQKLEQLEMVMGEDGILQLSDTVHYNPSDLSGWVQTMLLVLNDDNNNTADDSGHILLPGDSSTTMIDFSSEIVVHGKPGSKIHLDDDLRAIAGGAIYRSESESLMPGNGNPNGNGVKRMKTTVAGSEVVDVQPESPRPVVLVDSQEAGIRLVHTLMACAEAIQRNELKLADALVKHVGILVASQAGAMAKVATYFAGALAQRIYNIYPQNALETSCYEILQMHFYETCPYLKFAHFTANQAILEAFAGATRVHVIDFSLNQGMQWPAFMQALALRYGGPPAFRLTGIGPPQPDNSDALQQVGWKLAQLANTIGVEFEFRGFVANSIADIDANILDIRAPETEVLAVNSVFEVHRLLARPGAVEKVLSSITGMKPKIVTLVEQESNHNGNVFMERFNEALHYYSTMFDSLESSALTLPNSQDDLVMSEVYLGRQICNVVACEGTDRVERHETLTQWRVRMNSAGFEPVHLGSNAFKQASMLLALFADGDGYRVEENDGCLM

SEQ ID NO: 3960 - protein, 183 aa, Nicotiana benthamiana
AKISLLMLSSTRKFHEYTSPNTTQKKMIDQYQRTLGVDIWSTHYERMLENLKRLKEINNKLRREIRQRTGEDMSGLNLQELCRLQENISESVAEIRERKYHVIKTQTDTFKKKVKNLEEQHGNLVLDLEAKSEDPKYGTVENEGQYNSAMAFANGVHNHYAFRLQSMHPNLQNGGEYGSRNLR

SEQ ID NO: 3961 - protein, 244 aa, Silene latifolia
MGRGRVELKRIENKINRQVTFAKRRNGLLKKAYELSVLCDAEVALIIFSNRGKLYEFCSSPSMLKTLERYQKSNYGPPDNTAVSSREALEISSHQEYIRLKARYEALQRTHRNLMGEDLGPLSSKELESLERQLDMSLKHIRSTRTQYMLDQLADLQRKEHVLNEANITLKQRLIEADQVSSAQCYGHELDYGRQNPQAQADHVFFHPLECEPTLQIGYQPEQMNVTAAGPSINNFMTGWLPQN

SEQ ID NO: 3962 - protein, 249 aa, Arabidopsis thaliana
MDNLNVFANEDNQVNDVKPPPPPPRVCARCDSDNTKFCYYNNYCEFQPRYFCKNCRRYWTHGGALRNIPIGGSSRAKRARVNQPSVARMVSVETQRGNNQPFSNVQENVHLVGSFGASSSSSVGAVGNLFGSLYDIHGGMVTNLHPTRTVRPNHRLAFHDGSFEQDYYDVGSDNLLVNQQVGGYGYHMNPVDQFKWNQSFNNTMNMNYNNDSTSGSSRGSDMNVNHDNKKIRYRNSVIMHPCHLEKDGP

SEQ ID NO: 3963 - protein, 360 aa, Oryza sativa (japonica cultivar-group)
MEPTSSAAMARQTWELENNIPAAASDPDALDAIYRYDEAAQARVQQEKPWANDPHPFRRAKISALALLKMVVHARAGGTIEVMGLMQGKCEGDAIVVMDAFALPVEGTETRVNAQADAYEYMVEYSTINKQAGRLENVVGWYHSHPGYGCWLSGIDVSTQMLNQQFQEPFLAVVIDPTRTVSAGKVEIGAFRTYPKDYKPPDEPVSEYQTIPLNKIEDFGVHCKQYYALDITYFKSSLDSHLLDLLWNKYWVNTLSSSPLLGNRDYVAGQIFDLADKLEQAEGQLAHSRYGMLMPSQRKKEQEESPLAKVTRDSSKITAEQVHGLMSQVIKDILFNSVHPSNKASTSAPDSSGPEPMVEA

SEQ ID NO: 3964 - protein, 156 aa, Glycine max
MATAEEISTLKLLRQYLLGDISDPFLTNLIPVQSSIATSPPQNFNFPEEPMVSMKKEATCYATRHYRGVRRRPWGKFAAEIRDPKKKGSRVWLGTFDTEIDAAKAYDCAAFRMRGHKAVLNFPLEAGMSHPEPNSSGRKRRREYTTAATSSRHVMS

SEQ ID NO: 3965 - protein, 265 aa, Aspergillus oryzae
MEQSTQSASQQQGRQQPVYDTRNGGHYGASAALSAQGYAPVAELYTGTWANVNQGLQGTARDILTTYWQHIINHLESDNHDYKIHQLPLARIKKVMKADPEVKMISAEAPILFAKGCDIFITELTMRAWIHAEDNKRRTLQRSDIAAALSKSDMFDFLIDIVPREEATSHAKRSSQAAGAPSGAPGPTGAAGQLPPSQHGVQHPSHHMAPPDYSLGQHGLQDQEYRQPAMYAGPVQSDPTAAYGQPQSQMFEGMYAAYPHLPPQQ

SEQ ID NO: 3966 - protein, 245 aa, Arabidopsis thaliana
MGPMMMRAEEDNYNLNPPPWLIPMLRANYFIPCSIHAASNKSECNMFCLDCSSEAFCSYCLLNHRNHRVLQIRRSSYHNVVRVNEIQKFIDISCVQTYIINSARIVFLNERPQPRIGKGVTNTCEICCRSLLDSFRFCSLGCKLGGMKRDPSLTFSLRGKHGREYEGEWESDEATTPTKIRKTCAFNRLMSGLSISTVKCDYLSGDQPSSSSGDESGFKLSPGTPPIYNHRNSSRRKGVPHRAPF

SEQ ID NO: 3967 - protein, 303 aa, Oryza sativa (indica cultivar-group)
MSGGQDLQLPPGFRFHPTDEELVMHYLCRRCAGLPIAVPIIAEIDLYKFDPWQLPRMALYGEKEWYFFSPRDRKYPNGSRPNRAAGSGYWKATGADKPVGSPKPVAIKKALVFYAGKAPKGEKTNWIMHEYRLADVDRSARKKNSLRLDDWVLCRIYNKKGGLEKPPAAAVAAAGMVSNGGGVERKPMVGVNAAVSSPPEQKPVVAGPAFPDLAAYYDRPSDSMPRLHADSSCSEQVLSPEFACEVQSQPKISEWERTFATVGPINPAASILDPAGSGGLGGLGGGGSDPLLQDILMYWGKPF

SEQ ID NO: 3968 - protein, 277 aa, Zea mays
MEADALLHAPMTSSSSSSSSSSDSVGGSCVVNGAQELPSNTGKPHKNVKRKRTASPSAAPGGGVAPAPPEAAIADDDCGGRRRKRGSAGTRHPTFRGVRMRVWGKWVSEIREPRKKSRIWLGTFPTAEMAARAHDVAALAIKGRGAHLNFPHLAHDLPRPASTSPADIQAAAAKAAAAAADADVEVEQCESSHAVETPSSSAASSEEVAAASNAEEMSVLFDLPDLLMDLSDGLWSPIWAAAPAAVEEYDGGDSLSEPLLWAHEHCWLDAAAPVQPD

SEQ ID NO: 3969 - protein, 377 aa, Yarrowia lipolytica CLIB122
MWGSSHAFAGESDLTLQLHTRSNMSDNTTIKKPIRPKPIRTERLPYAGAAEIIRANQKDHYFESVLEQHLVTFLQKWKGVRFIHQYKEELETASKFAYLGLCTLVGSKTLGEEYTNLMYTIRDRTALPGVVRRFGYVLSNTLFPYLFVRYMGKLRAKLMREYPHLVEYDEDEPVPSPETWKERVIKTFVNKFDKFTALEGFTAIHLAIFYVYGSYYQLSKRIWGMRYVFGHRLDKNEPRIGYEMLGLLIFARFATSFVQTGREYLGALLEKSVEKEAGEKEDEKEAVVPKKKSSIPFIEDTEGETEDKIDLEDPRQLKFIPEASRACTLCLSYISAPACTPCGHFFCWDCISEWVREKPECPLCRQGVREQNLLPIR

SEQ ID NO: 3970 - protein, 255 aa, Oryza sativa (japonica cultivar-group)
MLRPPTPTRRLLQSVGGGSNPNRIPGIPPADPPSGGVSSDVVVILAALLCALICVVGLAAVARCARNRRNSGGAGAGAGSASPSHSPAHAGHFGGGGSGGGGVTTTTAATTAAKGLKKKALKALPKLAYADAVAAAAAARGTVVGEEEEGKVEVLAECAICLSEFGEREEVRVMPQCGHGFHVACVDTWLRSNSSCPSCRRPIVLDDPSPPKRCRKCEAIVLEAVVAASSSSSSSAATATGSGGGGGGGGGRFLP

SEQ ID NO: 3971 - protein, 371 aa, Medicago truncatula
MSLMKVFRSRKYSKSFKEVQSIDTVADDRRDAGGESADGTDWSTMLPDLLAEIIKRVDVAEEQWPHRQNVVACACVCKRWRDITREIVKSPQRNGTITFPSCLKQPGPRDLPHHCLIKRSKKTSTFYLYLALTSSFSDKGKFLLAARRYRCGTHTEYAISLDADDLSQGSNAYVGKLSSDFLGTNFTIYDSQPPHNGAKPSCARASRRFASKQISPQVPAGNFEAGDVSYKFNLLKSRGPRRMMCSLKFPVPSVGESSDSKSFDGQKMHSKEHAASAHTILKNKAPRWHEHLQCWCLNFHGRVTVASVKNFQLVATVDQSQPGGKGDEETVLLQFGKVGDDTFTMDYRQPLSAFQAFAICLTSFGTKLACE

SEQ ID NO: 3972 - protein, 367 aa, Medicago truncatula
MKLFRSLKLFRYFSNVKALNATNDDTVGSESEDKTDWSTMLPEVLADIIKRVDVIGEQWPHRRNVVACACVCKRWRDITREVVGSPSLNGKITFPSCLKQPGPRDLPHHCVVNWNKKTSTFYLYLALTPSLTDNGKFLLAARRYRFVTHTEYVISLDANDFSQGSNAYVGKLSSDFLEANFTIYDASAGAKPSSDRTSRRFASKQISPQFPAGNVEAGNISYKKFSLLKPKRPRRMICSLKSPVSSICESSDSKSFDNHTMHCKEQATSSAYTILKNKAPMWNEQLECWFLNFHERKDMTVASVKNFQLVATVDQSQPGGKGDEETVLLQFCKVGGDTFTMYYRQPLSAFHAFAICLTSFGTKLACQ

SEQ ID NO: 3973 - protein, 213 aa, Brassica napus
MDQQEHGQSRAMNYGTNPYQTGTVGPTAPSGQMAFHQQQQLTQQLQVFWQNQFKEIEKTTDFKNHSLPLARIKKIMKADEDVRMISAEAPVVFARACEMFILELTLRSWNHTEENKRRTLQKNDIAAAVTRTDIFDFLVDIVPREDLRDEVLGSIPRGTVPEASAAGYPYGYLPSGTAPVGNSGMVMGYPGSALPPNPYMGSPIWQHQGPGHL

SEQ ID NO: 3974 - protein, 238 aa, Oryza sativa (indica cultivar-group)
MGEEAPEEYELGGGEDERVMEWEAGLPGADELTPLSQPLVPAGLAAAFRIPPEPGRTLLDVHRASAATVSRLRRASSSSSSSFPAFASKGAGAGADEAESGGGADGGNGNTNNNSSKRARLVWTPQLHKRFVEVVAHLGMKNAVPKTIMQLMNVEGLTRENVASHLQKYRLYVKRMQGLSNEGPSPSDHIFASTPVPHASLHDQVPSPYHPHPHHHSYNNAAYAATVSSYHHYHHANH

SEQ ID NO: 3975 - protein, 213 aa, Brassica rapa
MVRGKTQMKRIENATSRQVTFSKRRNGLLKKAFELSVLCDAEVSLIIFSPKAKLYEFASSNMQDTIDRYLRHTKDRVSTKPVSEENLQHLKHEAANMMKKIEQLEASKRKLLGEGIGSCSIEELQQIEQQLEKSVKCIRARKTQVFKVQIEQLKQKEKALAAENKKLTEKWGSHEIEVWSNKNQESGRGDEESSPSSEVETELFIGLPCSSRK

SEQ ID NO: 3976 - protein, 191 aa, Triticum aestivum
  misc_feature (84)..(84): Xaa can be any naturally occurring amino acid
  misc_feature (167)..(167): Xaa can be any naturally occurring amino acid
MMKMTHDDYVHLCLMALASVATGGGQAEAAKGQWLQTLPATTAAACELRFRCSVCGKAFPSHQALGGHKASHRKRAALVLPLKXVSPAEETVASSTSSGVGGHRCSVCHRSFATGQALGGHKRCHYWDGLSVSLTASASGSGSSARDFDLNLTPVTEKAAAGMRRWXEEERGAEPLAVQERRLSSPSLELN

SEQ ID NO: 3977 - protein, 537 aa, Dubautia menziesii
ERKKEAKTTSSVPDSGGMDVLLEVLGYKVKSTDMADVAQKLEQLEMVMGEDGILQLSDTVHYNPSDLSGWVQSMLLVLNDNNNNTAHDSGHILLPGDSSTTMIDFSSEIVVHGKPGSKIHLDDDLRAIAGGAIYRSESESSMPGNGNPNGNGVKRMKTTVAGSEVVDVQPESPRPVVLVDSQEAGIRLVHTLMACAEAIQHNDLKLADALVKHVGILVASQAGAMAKVATYFAGALAQRIYNIYPQNALETSCYEILQMHFYETCPYLKFAHFTANQAILEAFAGATRVHVIDFSLNQGMQWPALMQALALRSGGPPAFRLTGIGPPQPDNSDALQQVGWKLAQLADTIGVEFEFRGFVANSIADIDANILDIRAPETEVVAVNSVFEVHRLPRRPGAVEKVLSSITGMKPKIVTLVEQESNHNGNVFKERFNEALHYYATMFDSLESSALTLPNSQDDLVMSEVYLGRQICNVVACEGTDRVERHETLTQWRVRMNSAGFEPVHLGSNAFKQASMLLALFADGDGYRVEENDGCLM

SEQ ID NO: 3978 - protein, 539 aa, Dubautia raillardioides
ERKKEAKTTSSVPDSGGMDELLEVLGYKVKSTDMADVAQKLEQLEMVMGEDGILQLSDTVHYNPSDLSGWVQTMLLVLNDDNNTTADDSGHILLPGDSSTTMIDFSNSSETVVHGKPGSKIHLDDDLRAIAGGAIYRSESESSMPGNGNPNGNGVKRMKTTVAGSEVVDVQPESPRPVVLVDSQEAGIRLVHTLMACAEAIQHNDLKLADALVKHVGILVASQAGAMAKVATYFAGALAQRIYNIYPQNALETSCYEILQMHFYETCPYLKFAHFTANQAILEAFAGATRVHVIDFSLNQGMQWPALMQALALRSGGPPAFRLTGIGPPQPDNSDALQQVGWKLAQLANTIGVEFEFRGFVANSIADIDANILDIRAPETEVVAVNSVFEVHRLLARPGAVEKVLSSITGMKPKIVTLVEQESNHNGNVFMERFNEALHYYSTMFDSLESSALTLPNSQDDLVMSEVYLGRQICNVVACEGTDRVERHETLTQWRVRMNSAGFEPVHLGSNAFKQASMLLALFADGDGYRVEENDGCLM

SEQ ID NO: 3979 - protein, 168 aa, Helianthus annuus
SSGDASQRLAHVFASGIEARLAGTGSQLYAAKCAIRISAAEKLQAYQVYLSACPFKKIGMSFANKTIFDSALASSNPTIHIVDFGIAYGFQWPIFIQHLSEVPDGPRKLRITGIEYPQPGFRPAERLQETGRRLANYCERFNVQFEYNSIASQNWETVKIEDLKLQRN

SEQ ID NO: 3980 - protein, 253 aa, Oryza sativa (japonica cultivar-group)
MVGMMETSPDDGGGGEAMAAAQQTEEDMGPPWLRPLLSTSFFVACASHPELSKNECNLFCLGCTGDALCAYCLPAHRDHHVVQIRRSSYHNVIRVSEVGKLIDISHVQTYVINSAKIVFLNGRPQARPGKGVTNTCEICCRSLPDSFRFCSLGCKLGGMRWDPSLTFAIRPKRGQDSGDGGSGSDYDSFSPKKARRAAAGYDQLGRFDRGMIRWSDDEGSKSNTAPITPTTPPISRCRPSRRKGIPHRAPFYG

SEQ ID NO: 3981 - protein, 537 aa, Dubautia microcephala
ERKKEAKTTSSVPDSGGMDELLEVLGYKVKSTDMADVAQKLEQLEMVMGEDGILQLSDTVHYNPSDLSGWVQTMLLVLNDDNNNAADDSSHILLPGDSSTTMIDFSSEIVVHGKPGSKIHLDDDLRAIAGGAIYRSESESLMPGNGNPNGNGVKRMKTTVAGSEVVDVQPESPRPVVLVDSHEAGIRLVHTLMACAEAIQRNDLKLADALVKHVGILVASQAGAMAKVATYFAGALAQRIYNIYPQNALETSCYEILQMHFYETCPYLKFAHFTANQAILEAFAGATRVHVIDFSLNQGMQWPAFMQALALRSGGPPAFRLTGIGPPQPDNSDALQQVGWKLAQLANMIGVEFEFRGFVANSIADIDANILDIRAPETEVVAVNSVFEVHRLLARPGAVEKVLSSITGMKPKIVTLVEQESNHNGNVFMERFNEALHYYSTMFDSLESSALTLPNSQDDLVMSEVYLGRQICNVVACEGTDRVERHETLTQWRVRMNSAGFEPVHLGSNAFKQASMLLALFADGDGYRVEENDGCLM

SEQ ID NO: 3982 - protein, 168 aa, Helianthus annuus
SSGDASQRLAHVFASGIEARLAGTGSQLYAAKCAIRISAAEKLQAYQVYLSACPFKKIGMSFANKTIFDSALASSNPTIHIVDFGIAYGFQWPIFIQHLSEVPDGPRKLRITGIEYPQPGFRPAERLQETGRRLANYCERFNVQFEYNSIASQNWETVKIEDLKAQRN

SEQ ID NO: 3983 - protein, 505 aa, Arabidopsis thaliana
MSSTFNPAASSPDEEGTGEVKIEDQCVENKQSTPASCSSVSEGSAGSSHKSPTIASPATVSPTHRYLGRTSGPIRRAKGGWTPEEDETLRQAVDTFKGKSWKNIAKSFPDRTEVQCLHRWQKVLNPDLIKGPWTHEEDEKIVELVEKYGPAKWSIIAQSLPGRIGKQCRERWHNHLNPDINKDAWTTEEEVALMNAHRSHGNKWAEIAKVLPGRTDNAIKNHWNSSLKKKSEFYLLTGRLPPPTTTRNGVPDSVTKRSSSAQKRVFGSVAQTSSVTTDVNNLAEDGNGQINSSVPVEEVVAASRMTSLNEYARSPQLPNPEPLPENGGAANNGYHLYYTPQIDYYRASEVDTQRMYGNECGCSPSASPVSFFTPPPCRNVHSNGSTPRSPESYLREAGRTYPNTPSIFRKRRPRVVVQDNNNAKKTDEAKEVDQKVNDGKDSSEIQNNGSNAYNLSPPYRIRSKRTAVFKSRQLEFISREEEKADDETKSSEKDMLIDGDSQLLG

SEQ ID NO: 3984 - protein, 164 aa, Oryza sativa
MKIGCDACEQAEAAVLCCADEAALCRRCDAAVHSANRLAGKHTRVALLLPSSSSAAAGDDDHHPTCDICQEKTGYFFCLEDRALLCRSCDVAVHTATAHAAAHRRFLITGVRIGGSRRRRRRGRRHRQPNKQQHRAGRLGQQQPRRRQAAGSRRQQQWPVAGAR

SEQ ID NO: 3985 - protein, 316 aa, Zea mays
MYSGQQSDQGPSANSGREFSEANWNSYTMHQKIAYSGQHGFGPYGMGLEDRLGLYQSSSGTLSHDIQMSDEHSGGVKKRKGVEDCVTLLPNAGDQQTEGSSQPERNSMEEGNRKISPKIQSKEDSSDGDGTKEDYVHIRAKRGQATNSHSLAERLRRKKISERMKLLQDLVPGCSKITGKAVMLDEIINYVQSLQRQVEFLSMKLATVNPELGFDIEQIISKQMLLSQDRHLAFYGVEPGSSGLTGPFNQGIMQPELMCTIANPVDVLHGAIHDASTMNHIPSMWEGLQNMPQMNFNPGVAADSGTNNSGSMKIEQ

SEQ ID NO: 3986 - protein, 236 aa, Oryza sativa (japonica cultivar-group)
MAPRTSDKTMSPAAAATGLALGVGGVAGAAAVGTGQHFRGVRKRPWGRYAAEIRDPAKKSRVWLGTFDTAEEAARAYDAAAREYRGAKAKTNFPYPNGAPAAGVNSGSSNSSTVESFGSDVQAPMKAMPIPPSLELDLFHRAAAAAAAGAGGMRFPFEGYPVSHPYYFFGQAAAAAAASGCRMLKIAPAPVTVAALAQSDSDSSSIVDLAPSPPAALAKKAIAFDLDLNCPPPMEV

SEQ ID NO: 3987 - protein, 92 aa, Mimulus nasutus
GLFKKAHELTVLCDAKVSILMISSTQKLHEYISPSITTKQMFDQYQKAVGVDVWNTHYERMQEHLKKLKDVNRNLRTEIRQRIGESLNDLGY

SEQ ID NO: 3988 - protein, 134 aa, Triticum aestivum
QAAILSDATRMVIQLRSEAQQLKETNGSLEEKIKELKAEKDELRDEKQKLKLEKESLEHQMKLMTSTPAYMPHPTLMPAPFPQAPLAPFHAQGQAAGQKLMMPFVSYPGYPMWQFMPPSEVDTSKDSEACPPVA

SEQ ID NO: 3989 - protein, 279 aa, Glycine max
MENRTSSVLPPGFRFHPTDEELIVYYLCNQASSRPCPASIIPEVDIYKFDPWELPDKTDFGEKEWYFFSPRERKYPNGVRPNRATVSGYWKATGTDKAIYSGSKHVGVKKALVFYKGKPPKGLKTDWIMHEYRLIGSRRQANRQVGSMRLDDWVLCRIYKKKNIGKSMEAKEEYPIAQINLTPANNDSEQEMVKFPRTSSLTHLLEMDYLGPISHILSDATYNSTFDFQINTANGGIDPFVKPQPVEIPYATDSGKYQVKQNSTINPTIFVNQVYDQRG

SEQ ID NO: 3990 - protein, 255 aa, Arabidopsis thaliana
MSCNNNGLAFFPENFSLQNHHQEEEDHPQLLQDFHGFLGKRSPMNNVQGFCNLDMNGDEEYSDDGSKMGEKKRRLNMEQLKALEKDFELGNKLESDRKLELARALGLQPRQIAIWFQNRRARSKTKQLEKDYDMLKRQFESLRDENEVLQTQNQKLQAQVMALKSREPIESINLNKETEGSCSDRSENISGDIRPPEIDSQFALGHPPTTTTMQFFQNSSSEQRMVKEENSISNMFCGIDDQSGFWPWLDQQQYN

SEQ ID NO: 3991 - protein, 227 aa, Cymbidium hybrid cultivar
MGRGKIEIKKIENPTNRQVTYSKRRVGILKKAKELTVLCDAQVSLIMFSTTGKLADYCSPSTDIKGIYERYQIVTGMDLWNAQYERMQNTLNHLKEINQNLRKEIRQRNGEELEGLDIKELRGLEQTLEESIRIVRQRKYHVIATQTDTYKKKLKSTRETYRALIQELEMKDENPNYNFSAENHSRVYQNSIPMATECPQMFSFRVVQPTQPNLLGLGYESHDLSLA

SEQ ID NO: 3992 - protein, 1927 aa, Helicobacter pylori
  misc_feature (907)..(907): Xaa can be any naturally occurring amino acid
MNEENDKLETSKKAQQDSPQDLSNEEATEANHFENLLKESKESSDHHLDNPTETQTHFDGDKSEETQTQMDSEGNETSESSNGSLADKLFKKARKLVDNKKPFTQQKNLDEETQELNEEDDQENNEYQEETQTDLIDNETSQKTQQHSPQDLSNKEATEVNHFEDSSKESKESSDHYLDNPTETKTNFDGDESEETQTQMDSRGNETSESSHGSLADKLFKKARKLVDNKKPFTQQKNLDEEIQELNEEDDQENNGYQEETQMDLIDDETSKKIQQYSPQDLSNEEATEVNHFEDSSKESKESSDHHLDNYTETKTNFDEDKSEEITDNSNDQEIIKGSKKKYIIGGIVVAVLIVIILFSRSIFHYFMPLEDKSSRFSKDRNLYVNDEIQIRQEYNRLLKERNEKGNMIDKNLFFNDDPNRTLYNYLNIAEIEDKNPLRAFYECISNGGNYEECLKLIKDKKLQDQMKKTLEAYNDCIKNAKTEEERIKCLDLIKDENLKKSLLNQQKVQVALDCLKNAKTDEERNECLKLINDPEIREKFRKELELQKELQEYKDCIKNAKTEAEKNKCLKGLSKEAIERLKQQALDCLKNAKTDEERNECLKNIPQDLQKELLADMSVKAYKDCVSKARNEKEKQECEKLLTPEARKKLEQQVLDCLKNAKTDEERKKCLKDLPKDLQSDILAKESLKAYKDCVSQAKTEAEKKECEKLLTPEAKKLLEEEAKESVKAYLDCVSQAKTEAEKKECEKLLTPEAKKKLEEAKKSVKAYLDCVSRARNEKEKKECEKLLTPEAKKLLEQQALDCLKNAKTDKERKKCLKDLPKDLQKKVLAKESVKAYLDCVSQAKTEAEKKECEKLLTPEARKLLEEAKKSVKAYLDCVSQAKTEAEKKECEKLLTPEARKLLEEXAKESVKAYLDCVSQAKNEAEKKECEKLLTLESKKKLEEAKKSVKAYLDCVSQAKTEAEKKECEKLLTPEAKKLLEQQALDCLKNAKTEADKKRCVKDLPKDLQKKVLAKESLKAYKDCVSKARNEKEKKECEKLLTPEAKKLLEEAKKSVKAYLDCVSQAKTEAEKKECEKLLTPEARKLLEEAKESVKAYKDCVSKARNEKEKKECEKLLTPEAKKLLEQQVLDCLKNAKTEADKKRCVKDLPKDLQKKVLAKESVKAYLDCVSRARNEKEKKECEKLLTPEAKKLLEEAKESLKAYKDCLSQARNEEERRACEKLLTPEARKLLEQEVKKSIKAYLDCVSRARNEKEKKECEKLLTPEARKFLAKQVLNCLEKAGNEEERKACLKNLPKDLQENILAKESLKAYKDCLSQARNEEERRACEKLLTPEARKLLEQEVKKSVKAYLDCVSRARNEKEKKECEKLLTPEARKFLAKELQQKDKAIKDCLKNADPNDRAAIMKCLDGLSDEEKLKYLQEAREKAVADCLAMAKTDEEKRKCQNLYSDLIQEIQNKRTQNKQNQLSKTERLHQASECLDNLDDPTDQEAIEQCLEGLSDSERALILGIKRQADEVDLIYSDLRNRKTFDNMAAKGYPLLPMDFKNGGDIATINATNVDADKIASDNPIYASIEPDITKQYETEKTIKDKNLEAKLAKALGGNKKDDDKEKSKKSTAEAKVESNKIDKDVAETAKNISEIALKNKKEKNGEFVDENGNPIDDKKKAEKQDETSPVKQAFIGKSDPTFVLAQYTPIEITLTSKVDATLTGIVSGVVAKDVWNMNGTMILLDKGTKVYGNYQSVKGGTPIMTRLMIVFTKAITPDGVIIPLANAQAAGMLGEAGVDGYVNNHFMKRIGFAVIASVVNSFLQTAPIIALDKLIGLGKGRSERTPEFNYALGQAINGSMQSSAQMSNQILGQLMNIPPSFYKNEGDSIKILTMDDIDFSGVYDVKITNKSVVDEIIKQSTKTLSREHEEITTSPKGGN

SEQ ID NO: 3993 - protein, 184 aa, Oryza sativa (indica cultivar-group)
MCEAAAPRYRGVRKRPWGRFAAEIRDPAKRARVWLGTYDSAEAAARAYDVAARNLRGPLARTNFPLVSSLPLPSPHYHLPGKAAAAAPPVAGPACSASSTVESSSGPRGPRPAATAAAVPRRRVPRPAPPAPDAGCHSDCASSASVVDDADDASTVRSRVAAFDLNLPPPLDRDHVDLCTDLRL

SEQ ID NO: 3994 - protein, 373 aa, Oryza sativa (japonica cultivar-group)
MAAAADAPPLPPGGRPARARARPRAGAISAAAAGGGRRSGSFVALYDREDVESVGLDDAARRLGVERRRIYDIVNVLESIGMLVRRAKNRYTWIGFGGVPAALAKLKEMSLRAVSSVASPSLDETSAANVSDDEDDDKLDDAEGDAESEKLSLSQSIDNPSDKPDAPPCKLRSEHRKEKSLGLLTQNFVKLFLTMEIETISLDEAAKRLLGEGHAANNMRNPKGRPQKTLNFGWLARPKGIKGVTVALPPTKTLPNKRAFGTDLTNIDNKRGKLDSTMENRGKPTQDGGNLFNNLQRQLGQENRSDFVYGPFHPAVARKQEHGNRTVQEKERKSIQDWENLASSFRPQYQNPVLHKRQEANETWKLLSARGLL

SEQ ID NO: 3995 - protein, 1251 aa, Populus trichocarpa
MIQNDGMQMLGLRKGAKKYGVIQCDPLVLKGLEKTGARETIEPALWKAIKESRFTVIIFSRDYAPSQWCLDDLVKIVQCMKEMGHTVLPVFYDVDPSETYEKAFVEHEQNFKENLENVQIWKDCLSTVTNLFGGDVRKRKESESIKIIAEYISYKLSVTLPTISKNLVGIDYRLEVLNGYIGEEVGKAIFIGICGMGGIGKTIVAKVYYDRIRWQFEGSCFLANVREVFAEKDGPRRLQEQLLSEILMERASVWDSSRGIEMIKRRLRLKKILLILDDVDDKEQLEFLAEEPGWCGPGSRIIVTRRDKKVVTGNNNYNIYEAEKLNDDDALMLFSQKAFKNDQPAVDFVELSKHVVGYANGLPLALEVIGSFLYERSIHEWRGAINRMNEIPDGKIIDVLRISFDGIGLPILIERSLISVSRDQVWMDNLLQIMGKEIVRCESPEELGRRSRLWTYEDVCLALMDSTSAVNLKIINLSNSLNLSRTPDLTGIPNLESLILEGCTSLSKIHPSLGSHKNLQYVNLVNCESIRILPSNLEMESLKVFTLDGCSKLEKFPDVLGNMNCLMVLCLDETELKEWQHGSFSNIELSFHSFQPGVKVKNCGVCLLYSLSSQSSAHFIVASKEASSSYKASLSVSSSYRQWMEDLFLSFRGADTSNDFTHLNTALALRVIIPDDKELEKVMAIRSRLLEAIEESGLSIIIFARDCASLPWCFDELVKIVGFIDEMRSDTVFPVSYHVEQSKIDDQTESYTIFFDKNEENSRENEEKVQRWMNIFSEVEIPSGSRSVERKIRKKIIGNLPVRVLDLKKPEKIRILEAKTPGTTLLVIYIIIWHREASMYTWMIGSSREERPSNLLSGRPFEESRFSIIIFSRDYASSPWCLEELVKIVQCMKEKGHTVLPVFYNVDPSETYEKAFVEHEQNFKENLEKVRNWKDCLSTVANLSGWDVRNRDCASLPWCFDELVKIVGFIDEMRSDTVFPVSCDVEQSKINDQTESYTIVFDKIGKNLRENEEKVQRWMDILSEVEISSGSRSAERFTMQGWGQECPGFRKSQAKKVVCIPAPAAANSRSSGEVVPSDLWAWKKYGQKHIKGSPYPRGYYRCSSSKGCLAKKHVERSRNDPNMLVITYNSEHNHPWPTQRNALAGSTRSQPTKSNAASKSSTGAQARKTANTKEDQKESSNDTLSPTDIIGGSSTASASVKEESDDIEKQMEMDDNEFSEGFSQSYCWWERPLVVTFKYSEEIKHIVFISK

SEQ ID NO: 3996 - protein, 288 aa, Medicago truncatula
MISENSNSNGGDENGDKVKGSWSKTEDETLVKLVKENGARNWSVISNEIPGRSGKSCRLRWCNQLSPTVQHLPFTPAEDSIIIEAHAVHGNKWATISRLLPGRTDNAIKNHWNSTLRRRRTAAPAAVPPVTTIVQRVPTAVPVTVIPTGVMIGKRVNESYDGDYYKDLLSLGTRYKRPCVLVENNSGSRGSREGEETVTEDDDAGNKGVNVVRTSLSLFPPGFLKEEEERKEKQKEIEDFEDSNDDLKLLKNEKLRSMLQRMIAEEVRNYVDKMRLGGGLAPDSTLRK

SEQ ID NO: 3997 - protein, 277 aa, Nicotiana tabacum
MDSSSCSSHFFYPMNSDLSSDSSWEWSNLNSTSLPFNVNDSEEMLLFGVLTNTAQETTSETVTSYHVKEEEVSSKSKVIKEIEEKPAKEKSFRGVRRRPWGKFAAEIRDSTRNGVRVWLGTFDSPEAAALAYDQAAFLMRGTSAILNFPVETVQESLRDMKCHVDEECSPVVALKKRHSLRKKSLSSKKSNSSSNSKVVREVKMENVNVVVFEDLGPDYLEQLLSSSSSDHSSCNEAFYHVNQRFTQLCIYLFIYLYYFCLFSFRGREIGEFHLFVL

SEQ ID NO: 3998 - protein, 246 aa, Psathyrostachys fragilis
SHHQHPLPHPPSSGGPDAFSYYYYYPPFSAAAATTDYPTPPAVSRSRAAVRKDRHSKICTAGGMRDRRMRLSLDVARRFFALQDKLGFDKASKTVQWLLDRSTAGINHLATSMSASMSLSEEDGSLLLDLDNNDHAMSMAADAETNKQQQQEHQTTKAKRRSAPAAPRKKRNNGGAPVLLPDKASRARARQRARERTKERNRLRSEAQAPAPLPARQPVVPAAACSNSYYEEGEQEPWELGGVVFA

SEQ ID NO: 3999 - protein, 249 aa, Antirrhinum hispanicum subsp. mollissimum
ATSVVDLNGNEIQLHDMLSGHYLTTANAPVLESTALFNNNNNFNHDVVNGLNRDPSPTFPTKQAVKKDRHSKIYTSQGPRDGRVRLSIGIARKFFDLQEMLGFDKPSKTLDWLLTKSKTAIKELVQSKSTKSNSSSPCDDCEEVVSVESENVTDHSKGKSLKANNKCKEAMDSHQAAAKESRAKARARARERTKEKMCIKQLNEAIVLRNHQFEVSGTREAFVHPVFGFHQQNYGSTSHENWDQSNFAS

SEQ ID NO: 4000 - protein, 256 aa, Saussurea medusa
MVRAPCFDKHGIKRGAWSQEEDNKLRAHIQRSGHSNWRQLPKLAGLSRCGKSCRLRWVNYLRPTIKHGNFTKDEKDVVVALHNKLGNKWSAIAARLPGRSDNEIKNYWHTHLKNRAQTDQTVLQTKQDGNAETSKGKGTPKAGCVVRKPNVKSQQEVEILLAVLSSASSSSFSSSTTSDQNESSPPSLSVSDANVTPQCSEEAARSLCIDQFLVEEDSIMLSSDKMYSPLGSVDYFISQDNVMDDVLLWPNLDFYY

SEQ ID NO: 4001 - protein, 168 aa, Helianthus annuus
SSGNASQRLAHVFASGIEARLAGTGSQLYAAKCAIRISAAEKLQAYQVYLSACPFKKIGMSFANKTIFDSALASSNPTIHIVDFGIAYGFQWPIFIQHLSEVPDGPRKLRITGIEYPQPGFRPAERLQETGRRLANYCERFNVQFEYNSIASQNWETVKIEDLKLQRN

SEQ ID NO: 4002 - protein, 224 aa, Oryza sativa (japonica cultivar-group)
MGRGKIEIKRIKNATNRQVTYSKRRTGIMKKARELTVLCDAQVAIIMFSSTGKYHEFCSPSTDIKGIFDRYQQAIGTSLWIEQYENMQRTLSHLKDINRNLRTEIRQRMGEDLDGLEFDELRGLEQNVDAALKEVRHRKYHVITTQTETYKKKVKHSYEAYETLQQELGLREEPAFGFVDNTGGGWDGGAGAGAAADMFAFRVVPSQPNLHGMAYGGNHDLRLG

SEQ ID NO: 4003 - protein, 187 aa, Leymus triticoides
  misc_feature (170)..(170): Xaa can be any naturally occurring amino acid
  misc_feature (176)..(177): Xaa can be any naturally occurring amino acid
  misc_feature (179)..(180): Xaa can be any naturally occurring amino acid
  misc_feature (184)..(184): Xaa can be any naturally occurring amino acid
SHHQHPLPRPPSSGGPDAFSYYYYYPPFSAAAATTDYPTPPAVSRSRAAVRKGRHSKICTAGGMRDRRMRLSLDVARRFFALQDKLGFDKASKTVQWLLDRSTAGINHLATSMSASMSLSEEDGSVLLDLDNNDHAMAMAADAETNKQQQQEPKKSNNGGAPVLLPDKAXRARARXXAXXRTKXRNR

SEQ ID NO: 4004 - protein, 281 aa, Physcomitrella patens
MGRGKIEIKKIENTTSRQVTFSKRRGGLLKKAHELAVLCDAEVALVIFSSTGKHFEFASSGSMRDIIERYRKNSDGAVKRGTNTDLLGREVIKLKQQVERLESSQRHMLGEDLSALKVSDLLELEQQLDQGASRVRARKNQLILEEIEDLRRKEHELMIANEALRKKIADAEGAAEAAARANFPDARLESPKPFASDFSRDMSVSSQLAASVYPHPNLLQAQRSQTSLQLGRLSEQQIPSTEEGCAGESSLKWDHPHFHIPNRLHANISPSVRTYKLHVDR

SEQ ID NO: 4005 - protein, 223 aa, Brassica napus
EPPINNNNWVKNPQMFEFDNSSPVVRTPEVVTSASFTPHVLTVNAGEDVTMKIMTFSQQGSRAICILSANGPVSNVTLRQSMTSGGTLTYEGHFEILSLTGSFIPSESGGTRSRAGGMSVSLAGPDGRVFGGGLAGLFIAAGPVQVVVGRFVAGQEESQQQQQQQQMKTQRRERFGIPTSTQASNISFGGGSAEDPKARYGLNKPVVIQAPPMSAPPVPFSQH

SEQ ID NO: 4006 - protein, 364 aa, Solanum tuberosum
MDRVKGPWSPEEDELLQQLVQKHGPRNWSLISKSIPGRSGKSCRLRWCNQLSPQVEHRAFTPEEDETIIRAHARFGNKWATIARLLNGRTDNAIKNHWNSTLKRKCSSLSADEGNELADQIFENQQPPLKRSVSAGSAMPVSGFHFSPGSPSGSDSDSSLHVTSSSQSHVFKPVARTGGVFPQSIDISSPPVDPPTSLSLSLPGVDLAEFSNRSADSTQSKNPFQLLLPPMQIPPPPPPPPPPPPQATTVPFERVSAIQQSLQNPDFGKNAGGEQPDKVFVPFSQELLGVMQEMIKTEVRNYMMGVEQKQQFQQQQQHYQQQPQQFQQQNHQLPSGLGLGLCMQQASDGFRDRAANRMRLSKFD

SEQ ID NO: 4007 - protein, 306 aa, Solanum tuberosum
RIKGPWSPEEDELLQTLVEKHGPRNWTLISKSVPRRSGKSCRLRWCNQLSPQVEHRAFTPEEDDTIIRAHAKYGNKWATIARLLSGRTDNAIKNHWNSTLKRKCPSMSEDLSFETPQPPLKRSSSVGPCTNFSSVMNPGSPSGSDLSDSSLSGFPQPLVYRPVPRTGGIFPLPPPVKQIEIPPSVPDPPTSLCLSLPGSGSIEKPTQSPKSPPLPPPPLPVVDKPIPPSAAVMGHLPRSNQSYDFCAAPKSGEKQFFTPEFLSVLQDMIRKEVKSYMSGFEQNGICMQTDAIRNAVIKRIGISKIE

SEQ ID NO: 4008 - protein, 255 aa, Solanum tuberosum
MDFFNRCSTSSSSSESSSSESSLSGKNPNKSERIKGPWSAEEDKILTKLVERYGARNWSLISKYIKGRSGKSCRLRWCNQLSPNVEHRPFSPAEDEAILAAHAKYGNRWATIARLLPGRTDNAVKNHWNSTLKRRYQQLIQQQNQNPIGFSDLKINGSGSGSGSGFGSCMEYLNADESPKGNSNNNNNNNYAVTNNCSGEFDDPMTTLSLAPPGMGGDELPEKKTESFPEGFWDVVRGVIAREVREYVASTGFPN

SEQ ID NO: 4009 - protein, 200 aa, Akebia quinata
AGIMKKAQELTVLCDAEVSLIMFSNTGKFTEYISPSVTTKQIFDQYQKVSGINIWQPHYERMQDNLNKQKEINNKLRREIRQRIGEDLDDLTIHELRGLEQNMESSLKTVRDRKFQVISTRTETHKKKFKNMEQTHAKLLREFEGRNDEPHFAMAGHEGEYESVLGLGNGGSHVFAFRLQQSQPNLQSGGEFGMNDLRLA

SEQ ID NO: 4010 - protein, 215 aa, Solanum tuberosum
MKDKEVKTRMKRGFWKPEEDLILKNCVETHGEGNWATISEKSGLMRSGKSCRLRWKNYLRPNIKRGMMSEDEKDLIIRLHKLLGNRWSLIAGRLPGRTDNEVKNFWNTHLNNKRSCRGKKKHVKSKEANTQSTQGKMQEYPAETVSNQEVATKTVLDSWIEEMQDFNCSLLSPLTMNNMPFLEDEPFIPILDDIVLLEAFTSTGKEAWNEIQPFL

SEQ ID NO: 4011 - protein, 189 aa, Arabidopsis thaliana
MDEFVNLKETELRLGLPGTDNVCEAKERVSCCNNNNKRVLSTDTEKEIESSSRKTETSPPRKAQIVGWPPVRSYRKNNIQSKKNESEHEGQGIYVKVSMDGAPYLRKIDLSCYKGYSELLKALEVMFKFSVGEYFERDGYKGSDFVPTYEDKDGDWMLIGDVPWEMFICTCKRLRIMKGSEAKGLGCGV

SEQ ID NO: 4012 - protein, 308 aa, Triticum aestivum
MGQLRAAPGGGGDCLIKLFGKTIPVPDAGDKDLQHRGSSATAEPKVQEIAPQDSTGSPPQQPEVVDVEDPSAAKNSAADQQDEEQGDTANQKEKLQKPDKILPCPRCSSMDTKFCYYNNYNINQPRHFCKNCQRYWTAGGAMRNVPVGAGRRKSKSVSAASHFLQRVRAALPGDPPLHAPVTPNGTVLSFGSDLSTLDLTEQMKHLKDKFIPTTGIKNTDEMPVGLCAEGLSKTEESNQTNLKEKVSADRSPNVAQHPCMNGGAMWPFGVAPPPAYYTSSIAIPFYPAAAAAVAAYWGCMVPGAWNAP

SEQ ID NO: 4013 - protein, 548 aa, Lolium temulentum
MYRVKSESTCEMMHQDQMDSPLADDGGGSSGGSPHRGGGPPLKKGPWTSAEDAILVDYVKKHGEGNWNAVQKNTGLFRCGKSCRLRWANHLRPNLKKGAFTPEEERLIIQLHSKMGNKWARMAAHLPGRTDNEIKNYWNTRIKRCQRAGLPVYPASVINQSANEDQQGSSDFNCGENLSNNHLNGNGLYLPDFTCDNFIANSEALSYAPQLSAVSISNLLGQSFASKRCGFMDQAGMLKQSDSLLPGLSDTVNGALSSVDQFSNDSGKLRQALGFDYLHEANSSSKILAPFGGALTGSHAYLNGTFSASRSTNGPLKMELPSLQDTESDPNSWLKYTVAPTMHPTELVDPYLQSPTATPSAKSECASPRNSGLLEELLHQAEALRSGKNQQPSVRSSSSSVSTPCDTTVVSPDFDLCQEYWEEHSGAMLHEYVPFSGNSLTESTAPVSAASPDAFQLSKISPESNSLGSGEQAMEPTYEPGAGDASPRPENLRPDAFFSGNTADSSLFNNAIAMLLGNDMNTECKPGLFDPSSWSNMPHAFQMSEEFK

SEQ ID NO: 4014 - protein, 1802 aa, Helicobacter pylori
MNEENDKLETSKKTQQHSPQDLSNEEATEVNHFEDSSKESKESSDPYLNNPTETQTHFDGDKLEETQTQMDSGGNETSESSNSSLADKLFKKARKLVDNKRPFTQQKNLDEETQELNEEDDQENNEYQEETQMDLIDDETSKKTQQHSPQDLSNEEATEVNHFEDSSKESKESSDPYLDNPTETKTQETKTHFDGDKSEEITNDSNDQEIIKGSKKKYIIGGIVVAVLIVIILFSRSIFHYFMPLEDKSSRFSKDRNLYVNDEIQIRQEYNRLLKERNEKGNMIDKNLFFNDDPNRTLYNYLNIAEIEDKNPLRAFYECISNGGNYEECLKLIKDKKLQDQMKKTLEAYNDCIKNAKTEEERIKCLDLIKDENLKKSLLNQQKVQVALDCLKNAKTDEERNECLKLINDPEVREKFRKELELQKELQEYKDCIKNAKTEAEKNKCLKGLSKEAIERLKQQALDCLKNAKTDEERNECLKNIPQDLQKELLADMSVKAYKDCVSRARNEKEKKECEKLLTPEARKKLEQQALDCLKNAKTEADKKRCVKDLPKDLQKKVLAKESLKAYKDCVSQAKTEAEKKECEKLLTPEARKLLEEEAKESVKAYLDCVSQAKNEAEKKECEKLLTPEAKKKLEEAKKSVKAYLDCVSQAKNEAEKKECEKLLTPEAKKLLEQQALDCLKNAKTEADKKRCVKDLPKDLQKKVLAKESLKAYKDCVSRARNEKEKKECEKLLTPEAKKLLEESRKSVKAYLDCVSQAKNEAEKKECEKLLTPEARKLLEEEAKESVKAYLDCVSQAKNEAEKKECEKLLTPEAKKKLEEAKKSVKAYLDCVSQAKNEAEKKECEKLLTPEAKKLLEQQALDCLKNAKTEADKKRCVKDLPKDLQKKVLAKESLKAYKDCVSRARNEKEKKECEKLLTPEAKKLLEESRKSVKAYLDCVSQAKTEAEKKECEKLLTPEAKKLLEEAKESLKAYKDCLSQARNETERRACEKLLTPEAKKLLEQQALDCLKNAKTEADKKRCIKDLPKDLQKKVLAKESVKAYLDCVSRARNEKEKKECEKLLTPEARKLLEEAKESLKAYKDCLSQARNEEERRACEKLLTPEARKLLEQEVKKSVKAYLDCVSRARNEKEKKECEKLLTPEARKFLAKQVLNCLEKAGNEEERKACLKNLPKDLQENVLAKESLKAYKDCLSQARNEEERRACEKLLTPEARKLLEQEVKKSVKAYLDCVSRARNEKEKQECEKLLTPEARKFLAKELQQKDKAIKDCLKNADPNDRAAIMKCLDGLSDEEKLKYLQEAREKAVLDCLKTARTDEEKRKCQNLYSDLIQEIQNKRTQSKQNQLSKTERLHQASECLDNLDDPTDQQAIEQCLEGLSDSERALILGIKRQADEVDLIYSDLRNRKTFDNMAAKGYPLLPMDFKNGGDIATINATNVDADKIASDNPIYASIEPDITKQYETEKTIKDKNLEAKLAKALGGNKKDDDKEKSKKSTAESKVESNKIDKDVAETAKNISEIALKNKKEKNGEFVDENGNPIDDKKKAEKQDETSPVKQAFIGKSDPTFVLAQYTPIEITLTSKVDATLTGIVSGVVAKDVWNMNGTMILLDKGTKVYGNYQSVKGGTPIMTRLMIVFTKAITPDGVIIPLANAQAAGMLGEAGVDGYVNNHFMKRIGFAVIASVVNSFLQTAPIIALDKLIGLGKGRSERTPEFNYALGQAINGSMQSSAQMSNQILGQLMNIPPSFYKNEGDSIKILTMDDIDFSGVYDVKITNKSVVDEIIKQSTKTLSREHEEITTSPKGGN

SEQ ID NO: 4015 - protein, 272 aa, Oryza sativa (indica cultivar-group)
MEGGGGGGGGGGGGGGGGGGGGAPYATRTAEEVFRDLRGRRAGMIKALTTDVEKFYKLCDPEKENLCLYGYPNETWEVTLPAEEVPPEIPEPALGINFARDGMNEKDWLALVAVHSDSWLLSVAFYFGARFGFDREARRRLFNMINNLPTIFEVVTGAAKKQAKEKTPNSSSKSNKPSSKVQSKAESRSKSKLSAPKDEEGSGDDEGEEEEDDHDNTLCGTCGTNDGKDEFWICCDNCEKWYHGKCVKITPARAEHIKQYKCPDCTNKRTRA

SEQ ID NO: 4016 - protein, 204 aa, Zea mays
IRLEIAICLAALAGTRKFGLGREKDQHQHTKWCPTTTTTHAPSAQQELRFRCAVCGKAFATYQALGGHKSSHRKPTTPERYAAALAAAATTTAARGDHSDETTASSLSGSAASGGPHRCSICRRGFATGQALGGHKRCHYWDGMSVSISVSSGMASSSGLSTVRNFDLNLAPLPENGDAGMMKRWAEEEEVQSPLPIKKRRMSD

SEQ ID NO: 4017 - protein, 285 aa, Zea mays
MAGQPPPSGGSEDDFLEHFFAFPSAASAGAAGGHAGAGVGGDHPFPLALSLDAAAEAKPDRDPVQLAGLFPPVFAGAGGVHQPHLRGPPPPQMFQAQPKPGEGGMAPQPPAPRPKVRARRGQATDPHSIAERLRRERIAERMRALQELVPNTNKTDRAAMLDEILDYVKFLRLQVKVLSMSRLGGAGAVAQLVADIPLSVKGEAGDGGGAQQQQQHVWEKWSTDGTEKQVAKLMEEDIGAAMQFLQSKALCMMPVSLAMAIYDTQHPLDGHGHGHSLKPEPNASS

SEQ ID NO: 4018 - protein, 358 aa, Physcomitrella patens
MPKPCDACHVSSAAVFCRADAAYLCVGCDGKVHGANKLASRHERVWMCEVCEVAPAVVTCKADAASLCVACDTDIHSANPLAQRHERVPVTPLFESASPLRGPDFCVLVSENGCHDLLKGCEDASVVEAVSWLLPHPKISTNSIIRGSAAADEMGSSPFHDRPFSPKPKKQKVELPADIFSDVDPFLDLDDATVTGIQPDSLVPVHMPECSEDTDSLAHSMDPSFTKFPLSAKSGYSYGTSTLTQSISCSSLDAAVVPDSSLSDISTPYLDSQSSQDMSARLPHQTGGPIDTVDREARVLRYKEKRQKRKFEKTIRYASRKAYAESRPRIKGRFAKRTDSDMEQFGSVDSSFGVVPSF

SEQ ID NO: 4019 - protein, 179 aa, Triticum aestivum
IEIKRIENTTNRQVTFCKRRNGLLKKAYELSVLCDAEVALIVFSGRGRLYEYSNNSVKATIERYKKATSDTSSAGTVAEINAQHYQQESAKLKQQITTLQNSNRTLIGDTMATMSHRDLKQLEGRLDKGLGKIRARKNELLCAEIEYMQRREMELQNNNFFLREKVAETERGQQQTLNI

SEQ ID NO: 4020 - protein, 341 aa, Brassica napus
  misc_feature (149)..(149): Xaa can be any naturally occurring amino acid
  misc_feature (160)..(160): Xaa can be any naturally occurring amino acid
  misc_feature (175)..(175): Xaa can be any naturally occurring amino acid
MERMEAGLKSSIRQEMALKTTPPVYEEFHAVTAAQNDFSSEDFSVDDLLDLSNDDVFVEEEEAAEPKAQQEVLLCVSSEQPNDVEEVLPPGNEFGSLPSNQLPVPMDELADLEWLSHFVDDSFTEYSAPNLTGTPAEKNRRGLTGDRKXHPVTPASGKGXCFKSPLPAKARSRRXYRNGLKAWSLGSSGPSSSSSTSSSSSSSGLSSPWFSGAELLEPDFTSEKPPVPKKYKKRSAESVFSAKLQQQQPQRRCSHCGVQKTPQWRAGPKGAKTLCNACGVRYKSGRLLPEYRPACSPTFSSELHSNHHRKVIEMRRKKEPTDDSSTGLNQPVKTPQAVPSF

SEQ ID NO: 4021 - protein, 315 aa, Glycine max
MENNAFRDRILEDNEHEEIPDSFVCCVCLDLLYKPIVLSCGHICCFWCVYNSMNCLRESQCPVCRNQYYHFPTVCQLLHFLLLKIYTAAYKRRENQTLEEEKQSGFYSPQFDPDTCESQAKFGHSGSAANEGDDGTIYYDGESDIIGTPAKGKKMPQEELSVQRKLSVADVTCTMCKQLLFHPVVLNCGHVYCQTCVINIDDEMLRCKVCQSPHPRGLPKVCLELDHFLEEQFPEEYGQRRDAIELKQIKVKPGTPACLSGSLDNGKRVENIDWWSDPDPKVHIGVGCDFCGVKALVHHIWHLFVFYSLLLSLLY

SEQ ID NO: 4022 - protein, 246 aa, Arabidopsis thaliana
MGPMIRTEEEEDYTSPPWLMPMLRGSYFVPCSIHVDSNKNECNLFCLDCAGNAFCSYCLVKHKDHRVVQIRRSSYHNVVRVNEIQKFIDIACVQTHIINSAKIVFLNERPQPRIGKGVTNTCEICCRSLLDSFRFCSLGCKLGGMRRGDLSLTFSLKGKHGREYLGGSESDEATTPTKMRKTNAFNRLMSGLSISTVRFDDYGPNGDQRSSSSGDEGGFSFSPGTPPIYNHRNSSRRKGVPHRAPF

SEQ ID NO: 4023 - protein, 146 aa, Elymus repens
KDRHSKICTAGGMRDRRMRLSLDVARRFFALQDKLGFDKASKTVQWLLDRSTAGINHLATSMSASMSLSEEDGSVLLDLDNNDHAMAMAADAETNKQQQQEQTTKSKRRSAPAAPRKKSNNGGAPVLLPDKASRARARQRARERTK

SEQ ID NO: 4024 - protein, 312 aa, Glycine max
MKRLGSSDSLGALMTICPPTDEHSPRNNHAYGREFQSMLEGLDEEGCVEEPGHHSEKKRRLSVDQVKALEKNFEVENKLEPDRKLKLAQELGLQPRQVAVWFQNRRARWKTKQLERDYGVLKANYESLKLNYDTLQQDHEALLKEIKELKSRLVQEENNNNTESDVSVKEEMLTTTLCETAIPGSDTKELSYECFNKSDEVGGGSSVFHVDFKDGSSDSDSSAILNEENNNHSPNNNAAISSCGVLQSHGLLLSPSSSSMNNCFQFQKQYQTTTTQYVKMEEHNFLSADEACNFFSDEQAPTLQWYCSEEWS

SEQ ID NO: 4025 - protein, 304 aa, Schizosaccharomyces pombe
MGEEAARIVLAKQDRSKGLVLATTGERMTSLIFSLVIDLVGVHVNKLLKQASYSSSFKLPFGLRNLLPEAVISKEKHLVYILNSFKPILLKLVSIIRFLCLTMKGHCATVSQLLLGLKYISLDEINPEEKKKVLTLLLLLGSRLIASILQHSNSYFDQHTISSITDERDLEDKNKLPFIPEGNRKCSLCMEFIHCPAATECGHIFCWSCINGWTSKKSECPLCRAFSSPSKIILLRYSVNSCFSCYNSTTSTTCQNTQLCSLACVKQLLFYIILTFSYMLFLKNCVLRTKNFLHFYAPFVYSSA

SEQ ID NO: 4026 - protein, 250 aa, Triticum aestivum
RATSPEAERLAQAIQRSHSSLDASRRQKLDGDGKMTGIGAVKKDGNCGCNSSFECNICLEAAKEPVVTPCGHLFCWPCLYQWLHGHSAHSECPVCKGEVLEVNVTPIYGRGGGERDACSNDVPPRPRANRSESLRQQLQMPDPRGIASMVRRLIENQDIVRGQAAPPAGGVEVTVLPAARSRARVRRQQRHSLVSPSPIMLRASNAAPESGNQASTSSTLAVIVGQAAQSRRSRPSESTTTRRTRRRQQQ

SEQ ID NO: 4027 - protein, 307 aa, Petroselinum crispum
MIQNQKVDNRRMGNHKQKWTAEEEEALKAGVKKHGMGKWKTILVDPDFATALTHRSNIDLKDKWRNLGISSSTAAQVSKDKSPVLSITNGSAAIPIAQTAITAQNAITAQNTVTAQNTVTAQNAATAQKASTTVALVDANAISSSPKTPANAVTIPTKRYYSLIFEAISSAKDPRGADFNTIATFIEQKNEVPHNFRRALSSLVRRLTMQKKLEKVEQRFKIKNSGTRIPTPRQRDAKPGTSRKSVLLDPATLEGAVSIASERLADAEHKSCVAIEAVKESENIAELAEEAESMLEIAKGIWEQCHL

SEQ ID NO: 4028 - protein, 273 aa, Oryza sativa (indica cultivar-group)
MELLLPTAAASAPPPPPAFPADPHLGKAAAKKGKTAASGEDGGDGGEDEKPAYVHVRARRGQATDSHSLAERARREKINARMELLKELVPGCTVSVRSKGTLGVQQRVMPSVGVQQQQHVVAPFFISKTEVSGTALVLDEIINHVQSLQRQVEYLSMRLAAVNPRVDFGGLDNFLTTECGRITGLNYKNGMDLEQVTWPDMGVHGARNLMQLQQQFWHGDLAHPLQPPSQWEKRTDTNPPVFSNSSSSLFGYDLASSALIGPQLLSLSLFQSV

SEQ ID NO: 4029 - protein, 307 aa, Petroselinum crispum
MIQTQKVDNRRMGNHKQKWTAEEEEALKAGVKKHGMGKWKTILVDPDFATALTHRSNIDLKDKWRNLGISSSAAAQVSKDKSPVLSITNGSAAIPIAQTAITAQNAITAQNTVTAQNTVTAQNAATAQKASTTVALVDANAISSSPKTPANAVTIPTKRYYSLIFEAISSAKDPRGADFNTIATFIEQKNEVPHNFRRALSSLVRRLTMQKKLEKVEQRFKIKNSGTRIPTPRQRDAKPGTSRKSVLLDPATLEGAVSIASERLADAEHKSCVAIEAVKESENIAELAEEAESMLEIAKGIWEQCHL

SEQ ID NO: 4030 - protein, 233 aa, Glycine max
MVSPENSNWLFDYPLIDDVIPVGDASFSVSASAFSWPPPPANVSVEIDASLGDSDGPKDTALKKRARCDSSTASSSKACREKLRRDRLNDKFVELGSILEPGRPPKTDKAAILIDAARMVTQLRDEALKLKDSNTSLQEKIKELKAEKNELRDEKQRLKAEKEKLEMQVKSMNAQPAFLPPPPAIPAAFAPQGQAPGNKLMPFIRYPGVAMWQFMPPATMDTSQDHVLRPPVA

SEQ ID NO: 4031 - protein, 87 aa, Mimulus nasutus
HELTVLCDAKVSILMISSTQKLHEYISPSITTKQMFDQYQKAVGVDVWNTHYERMQEHLKKLKDVNRNLRTEIRQRIGESLNDLGYE

SEQ ID NO: 4032 - protein, 256 aa, Nicotiana tabacum
MGSGKLGESGMIELTAKIMMVVIIFLFLVVVFIFFLHLYTKWFWRYRQEDTGNPNGGTRRRRRRRFNFAGGYQEVNVLRRGLDPSVLKTIPVVPFNMKDFKDGLECSVCLSEVSEGENTRVLPKCNHGFHVDCIDMWFHSHSTCPLCRNPVSEQSAESISETIGSSVEEGSASTETQNIPTNVLFWGDETSTTSSASTSNRPEGILVIDIARQNTEQEEEEGQKTPTSTRLRSLTRLFSRVNPCNVDVEQGSRSQS

SEQ ID NO: 4033 - protein, 332 aa, Oryza sativa (indica cultivar-group)
MDGRFPLPPASGGGRGHHRRAHSETFLRLPDADLLLDPEGDFSFSDLDFPSLSDDSPAISDPTPPPPPPMAATPAPAPRPPGGAHMRSLSLDTAFFEGFSLQGGGGGGGGGGGGGSGGSGGHKRSGSMDGVNSPFEGESALSGGLPDYAKKAMPAERIAELALIDPKRAKRILANRQSAARSKERKIKYTSELERKVQTLQTEATTLSAQLTLLQRDTSGLTAENRELKLRLQSMEEQAKLRDALNEALREEVQRLKIAAGQAPNMNGNPFNGGLQQQIPPYYTQQQQQQQQQMPYLGGHHAQQRHPSHQQSSSNGGQSLSGQSLNDSMDFM

SEQ ID NO: 4034 - protein, 187 aa, Fragaria x ananassa
MRKPCCEKTETTKGAWSIQEDQKLIDYIQKHGEGCWNSLPKAAGLRRCGKSCRLRWINYLRPDLKRGSFGEDEEDLIIRLHKLLGNRWSLIAGRLPGRTDNEVKNYWNSHLKKKILKTGTTLRPNKPHENNHAPNNKLVKLFNKMDDEVVDEVSSADSAAGCLVPELNLDLTLSIKTSTGMADPQVA

SEQ ID NO: 4035 - protein, 486 aa, Arabidopsis thaliana
MDLSAKDEFSAEKRNPDNYDSVNNPSGDWRVDSYPSENLISAGPASCSPSQMMDSFGQTLWYDPTSVQAVGYAGFNGGNASSSSFRGSIDRSLEMGWNLPNLLPPKGNGLFLPNASSFLPPSMAQFPADSGFIERAARFSLFSGGNFSDMVNQPLGNSEAIGLFLQGGGTMHGQCQSNELNVGEPHNDVSVAVKESTVRSSEQAEPNVPGSGNVSEDTQSSGGNGQKGRETSSNTKKRKRNGQKNSEAAQSHRSQQSEEEPDNNGDEKRNDEQSPNSPGKKSNSGKQQGKQSSDPPKDGYIHVRARRGQATNSHSLAERVRREKISERMKFLQDLVPGCNKVTGKAVMLDEIINYVQSLQRQVEFLSMKLATVNPQMDFNLEGLLAKDALQLRAGSSSTTPFPPNMSMSYPPLPHGFMQQTLSSIGRTITSPLSPMNGGFKRQETNGWEGDLQNVIHINYGAGDVTPDPQAAATASLPAANMKVEP

SEQ ID NO: 4036 - protein, 298 aa, Fragaria x ananassa
MGDTFEYNYQNNSSCSSSAPASSVSVAQSHSSTDEISLFLQQILVRSSSLTGQQFLFSSSPAGYALPENLGSPSNDSFVGGVIRGVDVSTAVVTASGPNVSSSSVGASENEADEYDCESEEGLEALVEEAAVKSGGRSSSKRSRAAEVHNLSEKRRRSRINEKMKALQNLIPNSNKTDKASMLDEAIEYLKQLQLQVQMLSMRNGMSLHPMCLPGASQFSQIRMDFGGEENRPVHLNMSGILNMNQDPSTQNLYNPNQSLCTRFVKCSQFRRCIWIGSIYSGSLGTLSAPKLIQGNLQ

SEQ ID NO: 4037 - protein, 179 aa, Triticum aestivum
MGRGKIEIKRIENATNRQVTYSKRRSGIMKKARELTVLCDAQVAIIMFSSTGKYHEFCSTGTDIKGIFDRYQQAIGTSLWIEQYENMQRTLSHLKDINRNLRTEIRMGEDLDALEFEELRDLEQNVDAALKEVRQRKYHVITTQTETYKKKVKHSQEAYKNLQQELGMREDPAYGFVDN

SEQ ID NO: 4038 - protein, 274 aa, Oryza sativa (japonica cultivar-group)
MGVHAMSCHGGGGGGGEGALSRQGSVYSLTLNEVESHLGEPLRSMNLDDLLRTVLPAAAAAAETAGRKTVDEVWRDIQGASTGRHHATPMGEMTLEDFLSRAGVAVDGAASAAGAHWLRGHYPPPPPPTTTTLQYVGGSGAVVDGVYNRVDGHGVAGFLSQVGVAGRKRGGGVDGVVEKTVERRQKRMIKNRESAARSRARKQAYTNELENKISRLEEENQRLREHKAVADFSTFPSCVDFLKAFLTQKLEPVMQIVPQPEPKQQLRRTTSASF

SEQ ID NO: 4039 - protein, 215 aa, Glycine max
MNHRPPFQDHMMLMSQLFPADAYTQIISQQGETNKKPRRRRNKKNKGGENGASEANKKRKLSEVQVNLLEQNFGNERKLESERKDRLAMELGLDPRQVAVWFQNRRARWKNKKLEEEYSSLKKNHEATLLEKCCLESEVLKLKEQLSEAEKEIQRLLESAERVPSNSSSSSQSQSMEAVDPPFFGEFGVDGYEDDVFYVPETHYINGMEWINLYM

SEQ ID NO: 4040 - protein, 807 aa, Helicobacter pylori
ALLNQQKVQVALDCLKNAKTDEERKECLKLINDPEIREKFRKELELQKELQEYKDCIKNAKTEAEKNECLKGLSKEAIERLKQQALDCLKNAKTDEERNECLKNIPQDLQKELLADMSVKAYKDCVSKARNEKEKQECEKLLTPEARKKLEQQVLDCLKNAKTDEERKKCLKDLPKDLQSDILAKESVKAYKDCVSQAKNEAEKKECEKLLTPEAKKLLEEEAKESVKAYLDCVSQAKTEAEKKECEKLLTPEAKKLLEEEAKESVKAYLDCVSQAKTEAEKKECEKLLTPEARKKLEEAKKSVKAYLDCVSQAKTEDEKKECEKLLTPEARKLLEQQALDCLKNAKTDEERKKCLKDLPKDLQKKVLAKESVKAYLDCVSQAKNEAEKKECEKLLTPEARKLLEEAKESIKAYKDCVSKARNEKEKKECEKLLTPEAKKLLEEEAKESVKAYLDCVSQAKTEAEKKECEKLLTPEAKKLLEEAKESLKAYKDCVSRARNEKEKKECEKLLTPEAKKLLEQQALDCLKNAKTEADKKRCVKDLPKDLQKKVLAKESVKAYKDCVSRARNEKEKKECEKLLTPEAKKLLEEAKESLKAYKDCLSQARNEEERRACEKLLTPEARKLLEQEVKKSVKAYLDCVSQAKTEAEKKECEKLLTPEARKFLAKQVLNCLEKAGNEEERKACLKNLPKDLQENVLAKESLKAYKDCLSQARNEEERRACEKLLTPEARKLLEQEVKKSVKAYLDCVSRARNEKEKKECEKLLTPEARKFLAKELQQKDKAIKDCLKNADPNDRAAIMKCLDGLS

SEQ ID NO: 4041 - protein, 403 aa, Oryza sativa (japonica cultivar-group)
MSFRSLIQEMRDEFGSISRHSLRSRSHRGGGGAPRVAAVGPAEAAAMQQSCWAQLPPELLREVLVRIEESEVWWPSRRDVVACAGVCRSWRGITKEIVRVPEASGKLTFPISLKQPGPRDGTLKCFIRRNRTTQTYYLYIGLTEALADDGKFLLAARKCRKPTCTDYLISLDMSDMSKGSNTYIGKLRSNFLGTKFTVYDAHPPYDGAVVSKSRSARVVGLNQVSPRVPAGNYPVSHISYELNVLGARGPRRMNCIMDSIPTSAVQEGGKAPTQTEFPLSGLDSFPSISFFRSKSARIDSATSQLSTQKEEKLVLKNKSPRWHEQLQCWCLNFRGRVTVASVKNFQLVASDENGPTNQEQDKVILQFGKIGKDLFTMDYRYPISAFQSFAICLSSFDTKIACE

SEQ ID NO: 4042 - protein, 265 aa, Brassica napus
MADTSSRTDASTDGDTDPRDLGSERGQMMLAGASDSSDRSKDKLDQKTLRRLAQNREAARKSRLRKKAYVQQLENSRLKLTQLEQELQRARQQGVFISSSGDQAHSTGGNGALAFDAEYSRWLEEKNRQMNELRSALNAHAGDTELRTIVEGVMAHYEELFRIESSAAKNDVFHLLSGMWKTPAERCFLWLGGFRSSELLKLIANQLEPMTERRVMGLNSLQQTSQQAEDALSQGMESLQQSLADTLSSGTLGSSSSDNVASYMG

SEQ ID NO: 4043 - protein, 300 aa, Zea mays
  misc_feature (225)..(225): Xaa can be any naturally occurring amino acid
MVRGKTQMKRIENPASRQVTFSKRRNGLLKKAFELSVLCDAEVALVVFSPRGKLYEFASGSAQKTIERYRTYTKDNVSNKTAHQDIEQVKADAEGLAKKLEALEAYKRKLLGERLEECSFEELHSLEVKLEKSLHCIRGRKTQLLEEQLHKLKEKEMNLRKSNEDLREKCKKQPPPPPPMLMAPPPPPAPAAIDHTGPKDVGMDVETELYIGLPGRDYRSNNKDXCTVAVRSGQVRLASSAENNLRSVVRRTGDASQAQANQHDKDHECRVVFYKPVHRPSKAHAPERPSENTYPLISLY

SEQ ID NO: 4044 - protein, 278 aa, Oryza sativa
  misc_feature (212)..(212): Xaa can be any naturally occurring amino acid
MKRPGGAGGGGGSPSLVTMANSSDDGYGGVGMEAEGDVEEEMMACGGGGEKKRRLSVEQVRALERSFEVENKLEPERKARLARDLGLQPRQVAVWFQNRRARWKTKQLERDYAALRHSYDSLRLDHDALRRDKDALLAEIKELKAKLGDEEAAASFTSVKEEPAASDGPPAAGFGSSDSDSSAVLNDVDAAGAAPAATDALAPEACTFLGAXPPAAGAGAGAAAAASHEEVFFHGNFLKVEEDETGFLDDDEPCGGFFADDQPPPLSSWWAEPTEHWN

SEQ ID NO: 4045 - protein, 375 aa, Zea mays
MKIQCNACGAAEARVLCCADEAALCVACDEEVHAANKLAGKHQRVPLLTDAAAAAAAAAPAVPKCDICQEASGYFFCLEDRALLCRDCDVAIHTVNSFVSVHQRFLLTGVQVGLDPADPVPPIAEKHVNAVGGSVNQPVRHQPRRSPTVQFSVEGSASVPTKNVTNGDCSRQNFVPTARAEVVDWTMNNSTIRSVESPPKYISEESPTLLQSSQTTTVFSNQINGNSDGAYHLSFSGGNVTDSLPDWPVDEFFSNSEYGPNFGFSENGSSKGDTAKLGGAGGSPQCRLAEGSVAEELLGQVPGLITDEYMGRVPENSWTVPEVPSPPTASGLNWHGNLCFPAYDSTMFVPEITSLQNSQSHFTVPSSFKRRRREY

SEQ ID NO: 4046 - protein, 186 aa, Arabidopsis thaliana
MEKVDVYDELVNLKATELRLGLPGTEETVSCGKSNKRVLPEATEKEIESTGKTETASPPKAQIVGWPPVRSYRKNNVQTKKSESEGQGNYVKVSMDGAPYLRKIDLTMYKQYPELMKSLENMFKFSVGEYFEREGYKGSDFVPTYEDKEGEWMLVGEVPWEMFVSSCKRLRIMKGSEVKGLGCGGL

SEQ ID NO: 4047 - protein, 583 aa, Triticum aestivum
MGLCCFFYILGAGQKSGTGRGDSIALRVTKETDCTILPNLHFETHHSMGGVNPLIMNNKVFKPCHIRYRDYTPCQDQNRAMTFPRENMTYRERHCPAENEKLHCLIPAPKGYVTPFAWPKSREYVPYANAPYKSLTVEKAVQNWIQHQGDVFHFPGGGTMFPNGASSYIDELASVIPLADGTIRTALDTGCGVASWGAYLMDRNILTMSFAPRDSHEAQVQFALERGVPAVIGVLGTMKLPYPSRSFDMAHCSRCLIPWKSNDGMYMMEVDRVLRPGGYWILSGPPINWKKYYKTWQRSKQDSEEEQNRIENIAEMLCWNKIYEKEDTVIWQKKANSNACHNKNGRTSKMCNVQDADDIWYKKMETCITPIPEGAQQLQKFPQRLFPVPPRILEGTPGVTEEVYEEDKKLWKKHVDTYKRVNKLIGKSRYRNIMDMNAGLGSFAAVLDSPGSWVMNVVPTISERNTLGIIYERGLIGIYHDWCEAFSTYPRTYDLIHASGVFSLYENKCDLEDILLEMDRILRPEGAVILRDNVEVLNKVRSTVTGMRWKSKLLDHEDGPLVPEKLLIAVKTYWVGREEGSSS

SEQ ID NO: 4048 - protein, 231 aa, Brassica napus
MAMDQSFEDAYGELYGEGAFSFNNNTKPDPITTSVPSSDDSSFDCNICLDSVQEPVVTLCGHLFCWPCIHKWLHVQTDEHQSHKQCPVCKSKVSHSTLVPLYGRGGGNSQEKDKNGDVPRRPVYKLEMANSSTDLRLSQRVHFDNRHGGYYPVNSLSYSPVMDPMMVMVGEMVATRLFGTRVMDRFTYRDTYNLAGTSGPRMRRQIMQADKSLGRISLFLICCVFLCLLLF

SEQ ID NO: 4049 - protein, 97 aa, Mimulus laciniatus
KRRNGLFKKAHELTVLCDAKVSILMISSTQKLHEYISPSITTKQMFDQYQKAVGVDVWNTHYERMQEHLKKLKDVNRNLRTEIRQRIGESLNDLGYE

SEQ ID NO: 4050 - protein, 105 aa, Zea mays
MGSSWTESQNNLFERALAVYDKDTPDRWHNVARAVGCGKTAEDVKRHYKYLKTDVKHIETEEGGRGSQSSSPAGAGAGGSGSSSSSSWGRDNGDKRMTRHPNMPQ

SEQ ID NO: 4051 - protein, 248 aa, Rosa hybrid cultivar
MAYENKPNTVLDADAQRRLGRGKIEIKRIENTTNRQVTFCKRRNGLLKKAYELSVLCDAEVALIVFSNRGRLYEYSNNSVRETIERYKKACADSSNNGSVSEATTQYYQQEAAKLRAQITTLQNSNRGYMAEGLSNMSIKELKGVETKLEKAISRIRSKKNELLFAEIEYMQKRELDLHNNNQLLRAKIADNERHQQSINAIAGGHGSYEIMQPTQPFHEARNYFQVNALEPNIHQYSRHDQISLQLV

SEQ ID NO: 4052 - protein, 105 aa, Mimulus nudatus
QTNRQVTYSKRRNGLFKKAHELTVLCDAKVSILMISSTQKLHEYVSPSITTKQMFDQYQKAVGVDVWNTHYERMQEHLKKLKDVNRNLRTEIRQRIGESLNDLGY

SEQ ID NO: 4053 - protein, 284 aa, Oryza sativa (japonica cultivar-group)
MVAVPVVADDGGGGHGAKGEESVSGSVAGISPSILIIAVIVVVMLLASVSIHYFIRHLCRRSSASAAASSSAPVLPVVVRPASSAAVGEQVVGKASAERAAEMERLISRLPLFTLASSLAALPKSSRDCAVCQSAFRDDDELRLLPACRHAFHSRCVDPWLRANPSCPLCRASIALPHPPLPDLLRVELGSAERGQPSSVTPTASFSSARSQERWSNRWSSRWSSRWSSGRWSSRYDAGTVTAAATAEWWWDMDGGAAPAARRREVEEQGNAFHGFMRWLTGAY

SEQ ID NO: 4054 - protein, 135 aa, Brassica napus
MGPMMRAEEESPPPWLIPLLRANYFVPCSIHADSNKSECNMFCLDCTSSSFCSYCLTNHKNHRVLQIRRSSYHNVVRVNEIQKYIDISCVQTYIINSARIVFLNERPQPRIGKGVTNTCEICCRSLLDSFRFCSL

SEQ ID NO: 4055 - protein, 310 aa, Arabidopsis thaliana
  misc_feature (233)..(233): Xaa can be any naturally occurring amino acid
MASNNPHDNLSDQTPSDDFFEQILGLPNFSASSAAGLSGVDGGLGGGAPPMMLQLGSGEEGSHMGGLGGSGPTGFHNQMFPLGLSLDQGKGPGFLRPEGGHGSGKRFSDDVVDNRCSSMKPVFHGQPMQQPPPSAPHQPTSIRPRVRARRGQATDPHSIAERLRRERIAERIRALQELVPTVNKTDRAAMIDEIVDYVKFLRLQVKVLSMSRLGGAGAVAPLVTDMPLSSSVXDETGEGGRTPQPAWEKWSNDGTERQVAKLMEENVGAAMQLLQSKALCMMPISLAMAIYHSQPPDTSSVVKPENNPPQ

SEQ ID NO: 4056 - protein, 792 aa, Zea mays
PAPELPLVDEMFEAVRSRGAGVHVVPTFAGWFSWKEIHPVEKQTLPSFFNGKSEKRTPEVYLAVRNSIMMKFHANPQLHLESKDLAELSIGETDARQEILEFLDHWGLINFHPFPPDGHEESKPEETQDNSNDEKASLIEQLFKFESVQSYMTPLPMKEDVRAPPPLPSLIPESVLIQDVVAAAEPSVEYHCNSCSVDCSRKRYHCRTQADFDLCCDCYNEGKFDPGMAKTDFILMDSAGVSGASGTSWTDEETLLLLEGLEIFGGKWAEIAEHVATKTKAQCMLHFLQMQIEDRFHDGKDINQNIPVSTDQATTEKAIAETSEKMEVEDKVEGRGTVDEKASEKTEGNCEETKTENASVVVNKDTQNSDGRDSGASPSTEEPKQSSDEQPVVKENSADVDTSGEKLSNVAIDILKSAFEATGHSPEYEGSFADAGNPVMALAAYLAGLVEDDNTTTSFRSSLKSVSDVSPALQLSSRHCFILEDPPDELKDICASVSKKNRDGDQKQDEDMIQNSIDTEKKEINEKEGKSLSVEKKNNSSMSQNDHQESGIKSVSSDDCSLVEPKTNNAKESGDSTAIGDKSATETTKGNTEQVNDLPSVEVEAPDDSSSKGKDELNKTKDAVATPATVQEQKHSQTLGNGDREEPNNIESVVVGEEKGSVVTANRPDSIARLKRAAATAVSAAAVKARFLGDQEEYQIRRLTALVIEKLFQKIEVKMSLFSEIEQVVFRTREYTEKTRKKLLKERNAIIAARMGALPSRPNQTGVAGNRLPPGYGNPPVRPPNAMPRPTS

SEQ ID NO: 4057 - protein, 215 aa, Medicago truncatula
MTRPLRILLSMETTPTTVVVAPPPEAVAIESDFVVILAALLCALICVVGLIAVARCAWLRRDSGAGNSPQQALANKGLKKKVLQSLPKFSYVDSNPGKWLATTECAICLSDFAAGDEIRVLPQCGHGFHVACIDTWLGSHSSCPSCRQILAVTRCQKCGRFPANGGEATGVTVSEPEMKSREDSNVGANSNSGGVSSCSNNSAHHNHSGNSGFLP

SEQ ID NO: 4058 - protein, 220 aa, Capsicum chinense
MQDSTTRAFASSSSSSGDGNNDAGDFECNICFELAQDPIVTLCGHLYCWPCLYRWLRLHPQCHECPVCKALIQEEKLVPLYGRGRTFTDPRSKPIPGLEIPSRPAGQRPETAPQPEPNNFPNLGFGHMGGFFPTATARFGNFSMFAGFGGLLPSLLSFQFHGFPGPTAYPTTSNHPFGYTPAYHGAHVRNAHDTAQVQADSNLKFMFLLVGFLVLIYLLG

SEQ ID NO: 4059 - protein, 293 aa, Triticum aestivum
MSMAPYEQVMDDLARGQQFATQLQGLLRDSPKAGHIMDQILHTFSRAIHTAKAAAAAAASASASGSEVTDGASSGGKRKPAARGGPRKACRTRTQDSSVVTKNMRSLEDGQTWRKYGQKEIQNSKHSKAYFRCTHKYDQQCMARRQAQRCDDDPDTFRVTYIGAHTCRDPAAVAAHAPGTAAGCHLISFAPAAAHGTTTSTTTTNSNKVGEDAATGSGLLLPGLKLEGGDLEEVLSSRTPGSSALYGGAAAAAAWPDQGDVTSTLQYGGAGAFGVLFDGYPYLEDILSYDLDH

SEQ ID NO: 4060 - protein, 316 aa, Oryza sativa (indica cultivar-group)
MEAGGGKRAAPEGTNGAAKRARGVNLKVKLIKLWILDIIVLYHLPFFFLSEKIRYPHNDYRCVFTSGCPFGSSCHFLHNFPGGYQAAAKMTSHGGTAVAAPPGRMPLGPGAPNGPPTSSVKTRMCNKYNTAEGCKWGSKCHFAHGERELGKPMLLDNSMPHPMGSMPFEAPPMPGPDIVPPSTFGASATAKISVDASLAGGIIGKGGTNTKHISRMTGAKLAIRDNESNPNLKNIELEGTFDQIKHASAMVTELIVRISGNVPPAKNPGRGSHAGGPGSNFKTKLCENFNKGSCTFGDRCHFAHGESELRKPPAAA

SEQ ID NO: 4061 - protein, 353 aa, Malus x domestica
MKERQRWSAEEDALLRAYVKQYGPREWNLVSQRMNTPLDRDAKSCLERWKNYLKPGIKKGSLTEEEQRLVICLQAKHGNKWKKIAAEVPGRTAKRLGKWWEVFKEKQQREQKNKKITDPIVEGKYDTILETFAEKLVKERAPTYLMATSNGAYLHTETSSPAPTILPPWLSNSNVSPNVRPPSPSVTLSLSPTVAPSPPIPWLQQDRGSDGSFVVGNLPHHGVVPACGENLVISELVECSRELEEMHRAWAAHKKEASWRLRRVELQLDSEKACRRREKMEEIEAKVKALREEQKAALDRIEAEYREQLAGLRRDAEAKEQKLAEQWAAKHLRLSQFLEQMGGRPRIVEPNGR

SEQ ID NO: 4062 - protein, 349 aa, Oryza sativa (japonica cultivar-group)
MELELSLGDSPAPVKATIAPTPVLIPTCMGDEEDLELVLGVRATRRDEQDDQTTCTQSSEEAMEGEEDETRPHGEAPVESLSFPLFVSSAETGSANSEMCTRGFDVNTRPADGGAEAGRPSSPSSMQEASTRQQVADQEAADDEDNGGGGARKKLRLSKEQSSFLEDSFKEHSTLTPKQKSDLANRLNLRPRQVEVWFQNRRARTKLKQTEVDCEHLKRCCERLTRENRRLQREVAELRGTLRTTTSSYPPLYGLHHLPAAAGTVFRVCPSCEHSKVVAAAASESFSPRVFAGGGAPAAITAAAAVPSPGAGSPPSSSAALFGARRPHFGPFAAAVIPPVLRRQPSATS

SEQ ID NO: 4063 - protein, 373 aa, Malus x domestica
MKERQRWQPEEDALLRAYVKQYGPKEWSLVSQRMGKPLLRDPKSCLERWKNYLKPGLKKGSLTPEEQALVVSLQAKHGNKWKKIAAELPGRTPKRLGKWWEVFKEKQLKLQSQRQKNKHLLCSTSSSSTQLPPDMNIPVAGIGSPEKAVKGPYDHILETFAEKYVVQPKVYGAAFQSTTMMQEPDPVLSLGSVGSTATSVTAPSVMPQWMNINPSSTTSSTSSTTPSPSVSLTLSPSDPVPDTDPTRFYQMGTLIQLCKEVEEGMQSWMQQKKEATWRLSRLEQQLEAEKGRKRREAVEEIEAQIRCLRQEEVALVGRIERDYREELSALQREAEGKEAKFVEAWCGKHAKLAKLVERIAVGVRNQGFSSKPS

SEQ ID NO: 4064 - protein, 193 aa, Helleborus orientalis
AGIMKKAQELHVLCDAEVALIMLSSTGKVIHYISPNTTDKAIYDKYQQSLGHSIWEPQYQQMQETLRKLKDINSKLRREIRQRVGEDLDDLTFNQLRGLEQHLNESAEIVRQRKFHQIKTQIETTKKKITHHEQTHNNLVHDYHEKLEDAFALVTHESVSLELSNGDGAHVFAFRNPYEADKAGYDLSDLRSG

SEQ ID NO: 4065 - protein, 95 aa, Mimulus platycalyx
RNGLFKKAHELTVLCDAKVSILMISSTQKLHEYISPSITTKQMFDQYQKAVGVDVWNTHYERMQEHLKKLKDVNRNLRTEIRQRIGESLNDLGYE

SEQ ID NO: 4066 - protein, 379 aa, Arabidopsis thaliana
MDLTGGFGARSGGVGPCREPIGLESLHLGDEFRQLVTTLPPENPGGSFTALLELPPTQAVELLHFTDSSSSQQAAVTGIGGEIPPPLHSFGGTLAFPSNSVLMERAARFSVIATEQQNGNISGETPTSSVPSNSSANLDRVKTEPAETDSSQRLISDSAIENQIPCPNQNNRNGKRKDFEKKGKSSTKKNKSSEENEKLPYVHVRARRGQATDSHSLAERARREKINARMKLLQELVPGCDKIQGTALVLDEIINHVQSLQRQVEMLSMRLAAVNPRIDFNLDTILASENGSLMDGSFNAAPMQLAWPQQAIETEQSFHHRQLQQPPTQQWPFDGLNQPVWGREEDQAHGNDNSNLMTVSENVMVASANLHPNQVKMEL

SEQ ID NO: 4067 - protein, 188 aa, Oryza sativa (japonica cultivar-group)
MRKSKQPQPQPSPEIRYRGVRKRPSGRYAAEIRDPAKKTPIWLGTFDSAEVAARAYDDAARSLRGPTARTNFPLAAPSAPPPRPPAAAAAAATSSHSSTVESWSGGAPRAAASALARSAAPMEATQEEDCHSYCGSSSSVLCEDGSDDAAASRTPLPFDLNMPPPEEELDMAAVADQMGIRYDTLLRL

SEQ ID NO: 4068 - protein, 219 aa, Oryza sativa (japonica cultivar-group)
FKLTPRRELSSQQRENTNSHDQPDLRHGRQPGVHDPIRRPHRRCLAELRHCRATAAAAAAGAAAGQRRRRKKKNKYRGVRQRPWGKWAAEIRDPRRAVRKWLGTFDTAEEAARAYDRAAVEFRGPRAKLNFPFPEQLSAHDDSNGDASAAAKSDTLSPSPRSADADEQVEHTRWPQGGGGGGGGGGGETGDQLWEGLQDLMQLDEGGLSWFPQSSDSWN

SEQ ID NO: 4069 - protein, 171 aa, Solanum demissum
MTCTNYEMAFFPTNFMLQTPHHEDEHQPSTSLNPILPSCSPQDFHGIASFLGKRSMSFSGMDGNNACEENHGEDDLSDDGSQAGEKKRRLNMEQVKTLEKNFELGNKLEPERKMQLARALGLQPRQIAIWFQNRRARWKTKQLEKDYEVLKRQFDAIKAENDALQTQNQKL

SEQ ID NO: 4070 - protein, 242 aa, Oryza sativa (japonica cultivar-group)
MVPRVERGGGGFHLPNSEREDSLFIRALISVVSGDTTVPTLLPEPTMATVVAGAATCARCGVDGCIGVDCEVVVLAAAAGSSCSDEEDEGECTTGAVASGGVTGGVGKRRPRRRSGGEGSRYRGVRRRPWGKWAAEIRDPRRAVCKWLGTFDTAEDAARAYDVAALEFRGQRAKLNFPASTAAQQPRPLLHHNLRENCGSNASSPVHAPEHARTAAAAKDQEIWDGLREIMMLDDGSFWSMP

SEQ ID NO: 4071 - protein, 247 aa, Oryza sativa (japonica cultivar-group)
MMERAEDLRLSLSLSSPLIAPRTHHVAMLFHAPPEKRFLEMPLLPAAKRSEVVAAEEERAGLRGGGGSDEEDGGCGIDGSRKKLRLSKDQSAVLEDSFREHPTLNPRQKATLAQQLGLRPRQVEVWFQNRRARTKLKQTEVDCEFLKRCCETLTEENRRLQKEVQELRALKLVSPHLYMNMSPPTTLTMCPSCERVSNTNNNSSAAAAADRRGIRTTTAAGGGSVVDTAADGGILCHRPIAVRPQQS

SEQ ID NO: 4072 - protein, 247 aa, Gnetum gnemon
MGRGKIEIKRIENTTNRQVTFCKRRNGLLKKAYELSVLCDAEVALIVFSSRGRLYEFANNSVKRTIERYRKTCADNNQGGAIAESNAQYWQQEAVKLKQQIDVLNNQIRHYMGECLQSMTIKELKQLEGKLEKGLGRVRSKRNEKLLEDIDTLQRREDNLIRENEYIRNKIAECQSHQHANMLTAAAVEYDAIPAAYDSRNFMHANLIEAAAAHHHYAQQEQTALHLGSEHKYSVHYPDPQAHKFQT

SEQ ID NO: 4073 - protein, 247 aa, Oryza sativa (indica cultivar-group)
MMERAEDLRLSLSLSSPLIAPRTHHVAMLFHAPPEKRFLEMPLLPAAKRSEVVAAEEERAGLRGGGGSDEEDGGCGIDGSRKKLRLSKDQSAVLEDSFREHPTLNPRQKATLAQQLGLRPRQVEVWFQNRRARTKLKQTEVDCEFLKRCCETLTEENRRLQKEVQELRALKLVSPHLYMNMSPPTTLTMCPSCERVSNTNNNSSAAAAADRRGIRTTTAAAGGSVVDTAADGGILCHRPIAVRPQQS

SEQ ID NO: 4074 - protein, 294 aa, Arabidopsis thaliana
MILTDKQISPRPTTTGFLYSGAGDYSQMFDALEDDGSLEDLGGVGHASSTAAEKKRRLGVEQVKALEKNFEIDNKLEPERKVKLAQELGLQPRQVAIWFQNRRARWKTKQLERDYGVLKSNFDALKRNRDSLQRDNDSLLGQIKELKAKLNVEGVKGIEENGALKAVEANQSVMANNEVLELSHRSPSPPPHIPTDAPTSELAFEMFSIFPRTENFRDDPADSSDSSAVLNEEYSPNTVEAAGAVAATTVEMSTMGCFSQFVKMEEHEDLFSGEEACKLFADNEQWYCSDQWNS

SEQ ID NO: 4075 - protein, 229 aa, Glycine max
MEDDEACITSLSLGLGIMGGHAQKKENKQKVHCLDLSFELCPKGKEEVEEAIDVDQQQQQQHANKAKGLLCLKHPNDETSPDSNNSNNGSRKKLKLTKEQSATLEDIFKLHSTLNPAQKQALAEQLNLKHRQVEVWFQNRRARTKLKQTEVDCEFLKKCCEKLTDENLRLKKELQELRAQKLGSTPLYIQLSKATTLTICSSCEKLLKPNEGNKGAINKLQNSIELGGI

SEQ ID NO: 4076 - protein, 418 aa, Oryza sativa
  misc_feature (51)..(51): Xaa can be any naturally occurring amino acid
RAPAPSRRATTRRRPGACPTRARSSPRCPPPAPGSAASSPTSPTRSPSACXPAFPQSAPPPPPPRGEQRELFRGFYEAGPYLKFAHLAANQAILEAFEGCNSVHVIDFALTDGIQWPSLIQALAVRPGGPPFLRITGIGPHAAGNRDELRDVGLRLAEFARSCSVPFAFRGIAADQLDGLRPWMFQVAPGEAVAINSVLQLHRLLVDQDAAAAASFPAPIDGVLDWVASMNPRVFTVVEQEADHNKSSLLERFTNSLFYYASMFDSLEAISRHGGGDGAGNPLAEAYLQGEIADIVSREGSSRVERHEQMPRWVERLRRGGMTQLPLGATGLWQAAMQLREFSGAGFGVQENGGFLTLTWHSQRLYSASAWRATAGKKMTMMASGAADAMEESQNSNTNGGGGGSSGGGHGALNQIMQ

SEQ ID NO: 4077 - protein, 351 aa, Malus x domestica
MTRRCSHCSNNGHNSRTCPTRVGSSSSSPSLGGGVKLFGVRLTDGSIIKKSASMGNLSSAAAHYHSSSPNPDSPSSDQLHDPVHVPDGYLSDDPAHASSSVNRRGDRKKGTPWTEEEHRMFLIGLQKLGKGDWRGIARSYVTTRTPTQVASHAQKYFIRQSNATRRKRRSSLFDMVPDMAPPLPEEQIFLPSSWEGDSEDANSLPSLNLSLSSESKPMETTHEETVIEHDHEPAMGSNGFPPMAPPYVPAYMSYPWPYWAPSAGPFREMVGEPSRQPVLRPIPIVPKEPVNVDALGMSQLSLGETERGLKEPSPLSLKLLGEPSRQSAFHPNAPASEPDLSKGKSSAIQAV

SEQ ID NO: 4078 - protein, 399 aa, Oryza sativa
MAAAADAPPPPPEVAPPAPAPAPAPAPYQPPRLAVADGAGGGGGGGGKPCRHHAYSRKQKSLGLLCTNFVALYDREDVESVGLDDAARRLGVERRRIYDIVNVLESIGEMSLRAVSSVASPSLDETSAANVSDDEDDDKLDDAEGDAESEKLSLSQSIDNPSDKPDAPPCKLRSEHRKEKSLGLLTQNFVKLFLTMEIETISLDEAAKRLLGEGHAANNMRTKVRRLYDIANVLSSLNLIEKTQQADSRKPAFRWLGQAKRNEGVTVALPPTKTLPNKRAFGTDLTNIDNKRGKLDSTMENRGKPTQDGGNLFNNLQRQLGQENRSDFVYGPFHPAVARKQEHGNRTVQEKERKSIQDWENLASSFRPQYQNPGLNDLFGHYMEAWRSWYSDLRRDRAS

SEQ ID NO: 4079 - protein, 304 aa, Malus x domestica
MGAPKQKWTAEEEAALKAGVLKHGAGKWRTILTDPEFNTILHLRSNVDLKDKWRNINVTAIWGSRQKAKLALKRNLPTPKHENNPLAVSTVIQSHEEVVDAKPLAISGGKSQTIESKDSKQPIARLDHLILEAITNLKEPGGSDRAAIAMHIEEQYWAPPKLKKLLSSKLKNMTATGKLIKVKHRYRIPLSSATSEKRRSSSALLLEGKQKDSLRKDKSDVNILTKSQVDADLTKMRSMTAQEAAAAAAQAVAEAEAAIAAAEEAAREAEAAEAEAEAAQVFAKAAMKALKCRKLDLDMKLTHG

SEQ ID NO: 4080 - protein, 88 aa, Pisum sativum
MDPSSQQMSRQSSMENMLVCSKEQQESKPKPQPEQALKCPRCDSTNTKFCYYNNYSLTQPRYFCKSCRRYWTKGGTLRNVPVGGGCRK

SEQ ID NO: 4081 - protein, 444 aa, Coprinopsis cinerea okayama7#130
MALSFLSSVASVASGLQKASNSSQPPPPPPPQNPLAAPLQNVSNLPGTSTTSSSASAAASTNGTTAASGSASLAGISVVALCISCQVKPKYFDGSKTHPFCSKTCAASKPKSSSAPKTGSGQASANTCVFCKVRPKYTDNNRTHDYCSKACANRANPQRKQSGLAASHGGNQNTCQAPGCTIPAHPTGDYCSVSHKTLAENLCLLCLKQTKMANSHFCSQTCIDDAEKKGPAILEVPNGHVTFKSVADQFKASWRHVGSTCPTVRRIYKIILPPTTLANYEKYRDAVEAKGQFVAQGRSKGNENRRWHGTRRTCNLGDKGHTQFCASTTCSLCSIIKNSYDISLWGKKTGWGRFGKGIYTSSTSSKSNDYSHNDCKSSLKAILLNKVVVGKGCKMLQDSTSLTAPPTGFDSVLAEKGGSLNYDELVVYTNDAIRPSYLVMYDEP

SEQ ID NO: 4082 - protein, 96 aa, Mimulus yecorensis
KRRNGLFKKAHELTVLCDAKVSILMISSTQKLHEYISPSITTKQIFDQYQKAVGVDVWNTHYERMQEHLKKLKDVNRNLRTEIRQRIGESLNDLGY

SEQ ID NO: 4083 - protein, 304 aa, Medicago truncatula
MGRTPCCDKKGLKKGPWTAEEDEILANYIKKNGGHGSWRSLPKITGLLRCGKSCRLRWTNYLRPDIKRGPFTPEEEKLVIQLHAILGNRWAAIASQLPGRTDNEIKNFWNTHLKKRLKSLGIDPKTHEPVASLTSYPNHKSHASVSTRHMAQWESARLEAEARLSIESSHFNNNPNSFTKTDSSSDYFLRIWNSEVGDAFRKVQKPDTDHINIITSCSQSPISAGSLSSNKCDSISAVTASNSIVKEELDWRNYKFSAEDVLLESDSSSSNDLQDSSDTALQLLFDFPMNNDMSFLGNSFASPF

SEQ ID NO: 4084 - protein, 229 aa, Triticum aestivum
MGRGKIEIKRIENATNRQVTYSKRRSGIMKKARELTVLCDAQVAIIMFSSTGKYHEFCSTGTDIKGIFDRYQQAIGTSLWIEQYENMQRTLSHLKDINRNLRTEIRQRMGEDLDALEFEELRDLEQNVDAALKEVRQRKYHVITTQTETYKKKVKHSQEAYKNLQQELGMREDPAYGFVDNPVAGGWDGVAAVAMGGGLAADMYAFRVVPSQPNLHGMAYGGSHDLRLG

SEQ ID NO: 4085 - protein, 212 aa, Medicago truncatula
MSFTGTLDKCKACDKTVYVVDLLTLEGIPYHKSCLKCTHCKGNLTMSTYSSMDGVLYCKPHFEQLFKESGNFSKNFQAKSSEKINELMNRTPSRLSSMFSGTLDKCAVCTKTVYPLEKMSLEGECYHKNCFRCAHGGCHLTHSSYAALDGVLYCKHHFQQLFMEKGNYNHVLQAAANKKNSTPPPEPADEEEPSKPEETEAQAEEKSETAET

SEQ ID NO: 4086 - protein, 340 aa, Ostreococcus tauri
MTVPSIACEARERLPRELSWIPDLVQGSFFAPCDVHSTGSKGEQRNMFSIGMRRSLCPACALDARATDTIQVRGSDEETLRPIVFEHVRDGAHVVAARPNPSRRSTQQTTIRRSSYHNVVRVQDVCRLIDVQEIQTYIINSARVVFLNERPHPRSTKGKEDKGTTSGRGDQRSRAGSTSQTIAHSECCHCARILQSDNSRYCSISCKVNAGEDMTAKDGIDMAFAAETIKPTPRKSVQAKNTSKSDKLSGDRRSPVRNKSPVSEGSGPRGKSPVKSEVKSEDDSPSSEGVTPTKVVSSAKRKYSSKDRPPGDAPLTPTLLSIVPHRRKSRPKKSPVGDDH

SEQ ID NO: 4087 - protein, 236 aa, Oryza sativa
MSRALWSTASLASRKGIKKADAVKGHWTVEEDRKLVKLVEQFGLKKWSLIGGMLPGRVGKQCRERWFNHLRPNIKKDTWSEEEDMVLIQIHKEVGNRWAEIAKCLPGRTENSIKNHWNATKRRQFARRRNRSTSKSGSTVLQNYIKSLAISPQESQMNNERSESNPSDMMITQGTPCCFDGNNCSQSHTSEENIVPSCVAKTFDDFWEMVYEYQCPVIVMLTQFDSLKVLAYINNL

SEQ ID NO: 4088 - protein, 129 aa, Candida albicans SC5314
MQGRNYSLLGGIIVLQFIVKSLVGMKSKEKKQTEDTTEDAKIRSINQLSQLSENYSAEYIIDLSDEKQLPYLPEASRSCMLCLSPMVNPSAANCGHLFCWDCIVDWIREHPECPLCRQQCLEQHLLPLK

SEQ ID NO: 4089 - protein, 171 aa, Glycine max
CAFGYQKRIEENRQKLVGVTNHVCTMSMERRNFSITDTNRSLDLLTKWQKDAIDMHNGVHASNGDVESNGYHDDSHGSTAVLLGSNVAVKNAVRPIKLPEVKKLPPYTTWIFLDRNQRMTEDQSVVGRRRIYYDQNGGEALICSDSEEETMDDEEEKRQFIESEDYILRLV

SEQ ID NO: 4090 - protein, 589 aa, Oryza sativa (japonica cultivar-group)
MSIVIVMSLCCFFYILGAWQKSGTGRGDSIALRVTKETDCTILPNLHFETHHSLGGVNPLVMTDKVFEPCHIRYSDYTPCQDQNRAMNFPRENMNYRERHCPTETKKLRCLIPAPKGYVTPFPWPKSRDYVPYANAPYKNLTVEKAVQNWVQFEGDVFRFPGGGTMFPNGANAYIDELASVIPFTDGTIRTALDTGCGVASWGAYLMDRNVLTMSFAPRDSHEAQVQFALERGVPAVIGVLGTIKLPYPSGSFDMAHCSRCLISWKSNDAMYMFEVDRVLRPGGYWILSGPPINWKTNHQAWKRSKEDLEAEQNVIEKIAEMLCWGKIHEKGDTVIWRKKADSNECHNKDDHPSKMCKIQDADDVWYKKMEGCITPFPEEAQLRKFPERLFAAPPRILQGRTPGVTEEIFEEDNKLWKKYVSTYKRINKLIGSLRYRNIMDMNAGLGSFAAIIDSPISWVMNVVPTISEKNTLGIIYERGLIGIYHDWCEAFSTYPRTYDLIHANGLFSLYQNKCNMEDILLEMDRILRPEGAVILRDNVEVLNKVRRTVMGMRWKSKLLDHEDGPHIPEKILVSVKKYWVGNEEENSS

SEQ ID NO: 4091 - protein, 261 aa, Medicago truncatula
MYKRRFNTKPLYVADREEPEPELKLEPILEDGPASPSSCEDTKIEESSPKKRREMKKRVVTIPIADVEGSKSRGETYPPSDSWAWRKYGQKPIKGSPYPRGYYRCSSSKGCPARKQVERSRVDPTNLLVTYAHEHNHSLPLPKSHHSSTNAVTATVTAAVDTPSPVESPAATPQPEDRPIFVTHPDFDLTGDHHAVFGWFDDIVSTGVLVSPICGGVEDVTLTMREEDESLFADLGELPECSTVFRQRNIPSVFQYSGITG

SEQ ID NO: 4092 - protein, 280 aa, Glycine max
MAFFPANFMLQTPHQDDHQPPPSLNSIITSCAPQEYHGGGASFLGKRSMSFSGIELGEEANAEEDSDDGSQAGEKKRRLNMEQVKTLEKSFELGNKLEPERKMQLARALGLQPRQIAIWFQNRRARWKTKQLEKDYDLLKRQYEAIKADNDALQFQNQKLQTEILALKSREPTESINLNKETEGSSSNRSENSSEIKLDISRTPAIDSPLSTQQNNNNRTLFPSSARPTGVAQLFQTTPRPEIQCQKIDHMVKEESLSNMFCAIDDQSGLWPWLEQQHFN

SEQ ID NO: 4093 - protein, 448 aa, Zea mays
MALLVKSHQQMLVSSSTTSSSSPSSASQQRHPPPPPPPSSSCLTDQQQPSPAKRKRRPPGTPDPDAEVVALSPRTLLESDRYVCEICGQGFQREQNLQMHRRRHKVPWRLVKRAPPPAGGGEDSAGANNSSTAGTGVGGGGGGPRKRVFVCPEPSCLHHDPAHALGDLVGIKKHFRRKHGGRRQWVCARCAKGYAVQSDYKAHLKTCGTRGHSCDCGRVFSRVESFIEHQDACNSSRIRGEAVAVAVPAPPSALPVIRPAVPRHQPTVAPAPPPPELQLLPASAAASAPLASTPTASLSTTTNASQEQEPHAAAAATTTTKLQLSIGPTVIAPGADAAAATASAVGEEDDSEAKELRRAMKEKAAADAARARARGEAAAAERALDEARRARQRARADLEKACALRDHAARLLAQVTCHACRQRSLAVAGGPAVACDSIIRGGGGEAGI

SEQ ID NO: 4094 - protein, 329 aa, Brassica rapa
MPRPFFHKLIFSSTIQEKRLRVPDKFVSRFKDELSVAVALTVPDGHVWRVGLRKADNNNKIWFQDGWQEFVDRYSIRIGYLLIFRYEGNSAFSVCIYNLPQSEINYHSTGLMDSASHNNHFKRPRLFEDLEDEDAETLHTTASAIQSFFTGPVKPEEATPTQTSKVPKKRGRKKKNADHPEEVNSSAPRDDDPESRSKFYESASARKRTVNAEERERAVNAAKTFEPTNPFFRVVLRPSYLYRGCIMYLPSGFAEKYLSGISGFIKVQLGEKQWPVRCLYKAGRAKFSQGWYEFTVENNLGEGDVCVFELLRTRDFVLKVTAYRVNEYV

SEQ ID NO: 4095 - protein, 225 aa, Tradescantia ohiensis
MGRGKIEIKKIENPTNRQVTYSKRRAGIMKKARELTVLCDAQVSIIMFSSTKKFSEYCSPGTNTKQIFDRYQQACQVDLWSSQYERMQNQLKSLKEVNNGLRREIRQRMGEDLDNMDIDELRGLEQNLHDSVKAVRERKYHVLQTQTETYKKKVKHSSEAYNNLVRALQMREDDPVYGYVDDEASHFEGALALANGGTHMYALRLQPNQPNLHAMEYAPHDLRLA

SEQ ID NO: 4096 - protein, 375 aa, Glycine max
MQGKEMEGLSSSSAIAQKTWELENNIIPMDTPGGAATSSTATTTTNADDSIFYYDEAGQNEFQRDKPWANDPHYFKRVKISALALLKMVVHARSGGTIEVMGLMQGKTDADAIIVMDAFALPVEGTETRVNAQADAYEYMVDYSQTNKQAGRLENVVGWYHSHPGYGCWLSGIDVSTQMLNQQFQEPFLAVVIDPTRTVSAGKVEIGAFRTYPEGYKPPDEPISEYQTIPLNKIEDFGVHCKQYYALDITYFKSSLDSHLLDLLWNKYWVNTLSSSPLLGNGDYVAGQISDLAEKLEQAENQLAHSRFGPLIAPTPRKKEEESPLAKITRDSAKITVEQVHGLMSQVIKDILFNSVHQANRTRTEPSGPEPMIES

SEQ ID NO: 4097 - protein, 225 aa, Commelina communis
MGRGKIEIKKIENPTNRQVTYSKRRAGIMKKAKELTVLCDAQVSIIMFSSTKKFSEFCSPGTNTKQIFDRYQQACQVDLWSAQYERMQNHLKNLKEINDGLRREIRQRMGEDLDGMDIEELRGLEQNLHDSLKTVRERKYHVLQTQTETYKKKVKHSSEAYNNFVRALQMKEDDPVYGYVDDEASHFEGALALANGSSHMYAFRLQPNQPNLHGMEYAPHDLRLA

SEQ ID NO: 4098 - protein, 323 aa, Oryza sativa (indica cultivar-group)
MESYYGAFHADEAAFFFPHHVPASPELPFGLIASPEPEQAAAEARQSAFQEYGGAVHAGAPAAAGAVTTGGTNIHRRVMDVLGRMGGGGGGGEKGEGEEMEEEEEVPQRRRRGQGADVESSRGFRHMMRERQRREKLSQSYADLYAMVSSRSKLQNVRNPPLIPLKWSVYQNRADKKPFVSLQGDKNSIVQSAAIYIHELKVARDQLQRRNEELKAQIMGHDEQQPCVTVQFEVDEPSSSIDSMIAALRRLKGMSVKARGIRSSMSGNRLWTEMNVETTIAACEVEKAVEEALKEVERNQPDSDAPFPGSKGWTQTSHVQNVF

SEQ ID NO: 4099 - protein, 323 aa, Triticum aestivum
  misc_feature (241)..(241): Xaa can be any naturally occurring amino acid
MGRHAGTGGGGGVQQKLRKGLWSPEEDEKLYNHIIRYGVGCWSSVPKLAGLQRCGKSCRLRWINYLRPDLKRGSFSQQEEDAIVGLHEILGNRWSQIASHLPGRTDNEIKNFGNSCLKKKLRQRGIDPSTHKPISGVAGVEPDQASKDERPQAADGIALKQQQQQVFDPFPVADTFGAGFDGAGMPLYDHLGGQDAAGFVDYSSVLDVSENLGYGESSSNSSNWDSAPQASNALEGEALHXWASESQVEAFAAYAGDEDGKVALPCHGQQEHSMAHLTSTSSTPEPGRICHRRIFVLFPPGTGKPTNGEDKDGLANFLKPGTP

SEQ ID NO: 4100 - protein, 205 aa, Trollius laxus
AGILKKAKELTVLCDAEVSLLMFSSTGKLHEFVSPSTTTKKVYDRYQQTSGISLWQSHYERMQDNLNKLKEINRKLRREIRQRNGEDLDGLTFQQLCTLEQNMDKSAECVRNRKFHVIGTQTDTYKKKLMLQVKNHEETQNDLLREMQRREAEYHYAFGDQEGDYPSAVNGNAAHIFAFRLQPSQPNLHLQDDASGYGSYGLSLA

SEQ ID NO: 4101 - protein, 188 aa, Lupinus micranthus
SGPYPYFPSSSSSYHPFAFFNPENASSNNTFSHDPFSFPFNIPNTHHYHAPNPETVANFADCAASAAMFKNDVSGSNFGFNNFMAKKPPPKKDRHSKIYTSQGLRDRRVRLSIEIARKFFDLQDMLGFDKASNTLEWLFNKSKKAMKELARSKNSSSGVVANSFSSSDSECEVVSMINQDSIDATPEG

SEQ ID NO: 4102 - protein, 192 aa, Arabidopsis lyrata subsp. petraea
DVYNPIKNHNPNPNPSPKHLMSSYSCRRSTQSLKDVIETKKTKPKPKKPKSKPDKREPDPVLSPSTRIRSTGARDRDPFLPTLTELAEGHQSRNVVEIIFQTSWGPKPFSGRVEMIFKVQNGSKTLTRFEEYREAVKARSVGKAREENARSVADGNETMRFYCLGPSYGGGGGAWGILGGKGVGASIYTFAG

SEQ ID NO: 4103 - protein, 324 aa, Nicotiana plumbaginifolia
PGCDSAVEYDLGSGSYDVTCCCSFSFCWNCTEEAHPPVDCDTVAKWILKNSAESENMNWILANSKPCPKCKRPIEKNQGCMHMTCTPPCKFEFCWLCLGAWSDHGERTGGFYACNRYESAKQEGVYDEAERRREMAKNSLERYTHYYERWATNQSSRQKAMADLHQMQTVHLEKLSEIQCQPESQLKFILESWQQIVECRRVLKWTYAYGYYLPEHEHAKRQFFEYLQGEAEAGLERLHQCAEKELQTYLNATGPSKDFNDFRTKLAGLTSVTRNYFENLVRALENGLADVDSQGACSKAPSSKNVAGSSKAKGGGRGKSSTRT

SEQ ID NO: 4104 - protein, 297 aa, Glycine max
  misc_feature (149)..(149): Xaa can be any naturally occurring amino acid
  misc_feature (253)..(253): Xaa can be any naturally occurring amino acid
MGNQKQKWTQDEEDALIAGVEKHGPGKWKNILKDPQFAPFLTSRSNIDLKDKWRNLSVSNGAQGSKEKSRVPKLKALPAPPAPTATPQNAAPALQNAASDVTPPDASQNDQDAKNPPRYNAMIFEALSALKDSNGSDMNAIIKFMEQKXLQVNQNFRRALSTKLRRLVSQGKLEKVQNGYKVKKEASSGTKSPSPKPKDVRPPQPQQQSPASVLMTNDTIKEAADTAAYRVADAESKSYLAAEAVKEAEKNIXLVEHSDSMLQLAKDIYEQCTIDKRSFLPLICEFFNLLLIIFNYH

SEQ ID NO: 4105 - protein, 291 aa, Arabidopsis thaliana
MGSSSKNIEQAQDSYLEWMSLQSQRIPELKQLLAQRRSHGDEDNDNKLRELTGKIIGDFKNYAAKRADLAHRCSSNYYAPTWNSPLENALIWMGGCRPSSFFRLVYALCGSQTEIRVTQFLRNIDGYESSGGGGGASLSDLSAEQLAKINVLHVKIIDEEEKMTKKVSSLQEDAADIPIATVAYEMENVGEPNVVVDQALDKQEEAMARLLVEADNLRVDTLAKILGILSPVQGADFLLAGKKLHLSMHEWGTMRDRRRRDCMVDTEVIFDACTTVNSGPRPTETTNNERN

SEQ ID NO: 4106 - protein, 159 aa, Phillyrea latifolia
LRTNSLEVSSGCGKGFMLFGVRVMEGSFRKSASLSNLAQYEQPHESNNDVAAGYASDDIVHPSGRSHDRKRGVPWTEEEHRLFLIGLQKVGRGDWRGISRNFVKARTPTQVASHAQKYFLRRNNHSRRRRRSSLFDITTDTVLDSKIGDQRHQENWYAV

SEQ ID NO: 4107 - protein, 291 aa, Arabidopsis thaliana
MGSSSKNTEQAQECCYLEWMSLQSQRIPELKQLLAQRRSHGDEDNDNKLRELTGKIIGDFKNYAAKRADLAHRCSSNYYAPTWNSPLENALIWMGGCRPSSFFRLVYALCGSQTEIRVTQFLRNIDGYESSGGGGASLSDLSAEQLAKINVLHVKIIDEEEKMTKKVSSLQEDAADIPIATVAYEMENVGEPNVVVDQALDKQEEAMARLLVEADNLRVDTLAKILGILSPVQGADFLLAGKKLHLSMHEWGTMRDRRRRDCMVDTEVIFDACTTVNSGQRPTETTNNERN

SEQ ID NO: 4108 - protein, 162 aa, Arabidopsis thaliana
MALIPPWTRDNDKRFELALVIFPEGSPYFLEYIAEFLQKPLEEVKYYYDAILVYDVVLIESGKYALPKYPEAYYVSLTEATESKHGETNQIPRIIPWTEEEHRFYGKGAWSMISREFVTSTQVASHAQKYDKRQKLDSKKRKRWSVLDITLESTKGKSDFVK

SEQ ID NO: 4109 - protein, 285 aa, Arabidopsis thaliana
MGSSSKNIEQAQECCYLEWMSLQSQRIPELKPLLAQRRSHGDEDNDNKLRELTGKIIGDFKNYAAKRADLAHRCSSNYYAPTWNSPLENALIWMGGCRPSSFFRFVYALCGSQTEIRVTQFLRNIDGYESSGGGGASLSDLSAEQLAKINVLHVKIIDEEEKMTKKVSSLQEDAADIPIATVAYEMENVGEPNVVVDQALDKQEEAMARLLVEADNLRVDTLAKILGILSPVQGADFLLAGKKLHLSMHEWGTMRDRRRRDCMVDTEVIFDACTTVNSGQRPTET

SEQ ID NO: 4110 - protein, 291 aa, Arabidopsis thaliana
MGSSSKNIEQAQDSYLEWMSLQSQRIPELKQLLAQRRSHGDEDNDNKLRKLTGKIIGDFKNYAAKRADLAHRCSSNYYAPTWNSPLENALIWMGGCRPSSFFRLVYALCGSQTEIRVTQFLRNIDGYESSGGGGGASLSDLSAEQLAKINVLHVKIIDEEEKMTKKVSSLQEDAADIPIATVAYEMENVGEPNVVVDQALDKQEEAMARLLVEADNLRVDTLAKILGILSPVQGADFLLAGKKLHLSMHEWGIMRDRRRRDCMVDTEVIFDACTTVNSGPRPTETTNNERN

SEQ ID NO: 4111 - protein, 97 aa, Triticum aestivum
MISAGDHGNDRRKFEPAAAGNKALQAAAAASRHWSASTESRIVRVSRVFGGKDRHSKVRTVKGLRDRRVRLSVPTAIQLYDLQDRLGLSQPSKVVDW

SEQ ID NO: 4112 - protein, 155 aa, Arabidopsis thaliana
MSTISPVFSTEPGLLTSVLPAFETSFTPWDISHLFSVFDSSIDPKPVSTHDYGSVNQIGSDMSPTDNTDERKKKRKLSNRESAKRSREKKQKHLEEMSIQLNQLKIQNQELKNQLRYVLYHCQRTKMENDRLLMEHRILHDKLLNIRQVLMFRQT

SEQ ID NO: 4113 - protein, 296 aa, Arabidopsis thaliana
MGNQKLKWTAEEEEALLAGVRKHGPGKWKNILRDPELAEQLSSRSNIDLKDKWRNLSVAPGIQGSKDKIRTPKIKAAAFHLAAAAAAAIVTPTHSGHSSPVATLPRSGSSDLSIDDSFNIVVDPKNAPRYDGMIFEALSNLTDANGSDVSAIFNFIEQRQEVPPNFRRMLSSRLRRLAAQGKLEKVSHLKSTQNFYKMNDNSLVQRTPHVARPKESNTKSRQQTNSQGPSISQQIVEASITAAYKLVEVENKLDVSKGAAEEIERLMKLAEEADEMLVIAREMHEECSQGKIMYLN

SEQ ID NO: 4114 - protein, 359 aa, Brassica oleracea
MTRRCSHCNQNGHNSRTCPNRGVKLFGVRLTEGSIRKSASMGNLSHYSGSGLSGLGGTGSNNPGSPGDGHDHGVGDGYASEDFVPGSSSSRERKKGNPWTEEEHRMFLMGLQKLGKGDWRGISRSYVTTRTPTQVASHAQKYFIRQSNVSRRKRRSSLFDMIPDELTDVMVDSQEQQAEDVPMETQMQSTDSVPAPLILETEECESMKSTNSSAEEPPTVTASSSSFTPEDTIQTQLQVQQPPGSFPVLYPTYFSPFYSFPFPVWPAAYVTEPAKEETHEILRPTAVHSKAAPINVDQLLGMSKLSLGESSQNGVSEQSLSLKLVGGSSSRQSAFHPNPASGGGGSDMNTVIHAVQKSA

SEQ ID NO: 4115 - protein, 553 aa, Hordeum vulgare subsp. vulgare
MYRVKSESDCEMMHQEDQMDSPVGDDGSSGGGSPHRGGGPPLKKGPWTSAEDAILVDYVKKHGEGNWNAVQKNTGLFRCGKSCRLRWANHLRPNLKKGAFTPEEERLIIQLHSKMGNKWARMAAHLPGRTDNEIKNYWNTRIKRCQRAGLPIYPASVCNQSSNEDQQGSSDFNCGENLSSDLLNGNGLYLPDFTCDNFIANSEALSYAPQLSAVSISSLLGQSFASKNCGFMDQVNQAGMLKQSDPLLPGLSDTINGALSSVDQFSNDSEKLKQALGFDYLHEANSSSKIIAPFGGALTGSHAFLNGTFSTSRTINGPLKMELPSLQDTESDPNSWLKYTVAPAMQPTELVDPYLQSPTATPSVKSECASPRNSGLLEELLHEAQGLRSGKNQQLSVRSSSSSVSTPCDTTVVSPEFDLCQEYWEERLNEYAPFSGNSLTGSTAPMSAASPDVFQLSKISPAQSPSLGSGEQAMEPAYEPGAGDTSSHPENLRPDAFFSGNTADSSVFNNAIAMLLGNDMNTECKPVFGDGIMFDTSVWSNLPHACQMSEEFK

SEQ ID NO: 4116 - protein, 274 aa, Brassica napus
MCSSPVSFWSSINDSSPRPSSLNSYPPHKLNSQIHRHSMSNDDGTVTNGAIVEHTSAANKGTLNAVKKPPAKDRHSKVDGRGRRIRMPIICAARVFQLTRELGHKSDGQTIEWLLRQAEPSIIAATGTGTTPASFSTASLSTSSPFTLGKRVVRAEEGESGAGGGELSVGHTMGASGGGGFWAVPARNDFTQVWSFAAGAPPEMLFTQQQQQPATLFVRHQQQQQQEASAAAAMGEASAARVGNYLPGHHLNLLASLSGGNTGSGRREEEDDSR

SEQ ID NO: 4117 - protein, 273 aa, Brassica oleracea
MGKDDLGLSLSLGFAQNQHPLQLNLKPTSSPMSNHQMFPWNQTFVSSSNHQNHQSLRKIDVNSFPSTVELEEETGVSSPNSTISSTVSGKRRSERQGSGDDLDIALDRSSSRGTSDEEEEYGGEACRKKLRLSKDQSAVLEDTFKEHNTLNPKQKLALAKKLGLTARQVEVWFQNRRARTKLKQTEVDCEYLKRCVEKLTEENRRLEKEAAELRALKLSPGLYGKMSPPTTLLMCPSCERVGGPSNHSQRSVSLNPWLQMAHGSTFDVKHPRS

SEQ ID NO: 4118 - protein, 371 aa, Cardamine hirsuta
MKERQRWSGEEDALLRAYVRQFGPREWHLVSERMNKPLNRDAKSCLERWKNYLKPGIKKGSLTEEEQRLVIRLQEKHGNKWKKIAAEVPGRTAKRLGKWWEVFKEKQQREEKESNKRVEPIDESKYDRILESFAEKLVKERSNNIVVVPPSAGKVVMANSNGGFLQHSEQTQPQPPNPVIPPWLATSNNGNNVVVRPPSVTLTLSPSTLAASTPPPPQIPWLQQQQQPERGENGLVLGSMMPSCSGSSSSESVFLSELVECCRELEEGHRVWSEHKKEAAWRLRRLELQLESEKTCRQREKMEEIEAKMKALREEQKIAMEKIDGEYREQLVGLRRDAEAKDQKLADQWTSKHIRLTKFLEQNMGCRLDRP

SEQ ID NO: 4119 - protein, 469 aa, Debaryomyces hansenii CBS767
MRCIHELADVFINDSDERILTQLLDATEIDKHADYESFFSINSDESIMKARPWKSNAKYFKKTYISSLALCKMSVHAKSGGAIEVMGMMTGKIIKNSIIVMDVYPLPVEGTETRVNAQAEGYEYMVQYLENLKQVGRDENIVGWYHSHPGYGCWLSGIDVATQSLNQNFQDPYLAIVIDPMKTEDQGKVEIGAFRTFPDNYKSPDSAAPTNNTRGVPPSKQKDFGVHSDKYYSLDIQIFKSNLDTEILNIISNKSWIGKLIKSVNTANHQEQNMIENVFKLINKLQKKEVNQLNRFEISFIKKFDLIFEDIISKKLMNDNRFYSTISQSSYDSFSGHGNSSSNDEMDDESDLDDRDKSSAPLDISDTGNDDVMSMESSVNVYTDKRGDDNDDDDDNDGYDKRPMYTNYRSRANLTKPRKLGSSPEEHVKLLNNVNKTITNISNHSKDIGLTELQDLIALKTKELIFLGK

SEQ ID NO: 4120 - protein, 192 aa, Lupinus bracteolaris
STYTSSGPYPYFPSSSSSYHPFAFFNPENASSNNTFSHDLLSFPYNTPTTHHYHAPIPETLSNFADCAASAAMLKNDVSGSNFGFSNFLAKKPASKKDRHSKIHTSQGLRDRRVRLSIEIARKFFDLQDMLGFDKASNTLEWLFNKSKKAMKELARSKNSSSGVAANSFSSSDSECEVVSMINPDSIDATPE

SEQ ID NO: 4121 - protein, 220 aa, Glycine max
  misc_feature (45)..(45): Xaa can be any naturally occurring amino acid
MNIFVPKFLLLSAVSSFSNSSSIKRERDQVLGGEEFEVVVEESSXRVVGDVDEDGNPRKKLRLTKEQAAVLEENFREHSTLNPKQKQELAMKLNLRARQVEVWFQNRRARTKLKQTESDCELLKKCCDTLTVENKKLQKELQELKSMQATPVPLYMQIPAATLSICPSCERICGGNENNGDNNNNGSSHTTTLLIGSKTHHHSFYKSNNYPFPHSSSAAC

SEQ ID NO: 4122 - protein, 305 aa, Nicotiana tabacum
MMTMVGHCGYLDGIPTGPVVDEDFDDILNFLDFPLESLEEDGQGVEWDASESKFLGPIPMDALMAFPPVPQGNIGNGRVKAEPNSNHPIKVTEGQGSGIFQTQSPVSVLESSNSCSGGKSISIKHDIAIPVRPRSKRPRSSALNPWILMPPISSTRFASKKTCDARKGKEKKRKMSLLSVPQIADVTKKKTTSGQQFSFKKCTHCQVTKTPQWREGPLGPKTLCNACGVRYRSGRLFPEYRPAASPTFVPTLHSNSHRKVVEMRKKAIYGETSALEEPHNVIVEGPPMSPAPEFVPMSSYLFDVY

SEQ ID NO: 4123 - protein, 117 aa, Glycine max
  misc_feature (4)..(4): Xaa can be any naturally occurring amino acid
  misc_feature (6)..(6): Xaa can be any naturally occurring amino acid
  misc_feature (18)..(18): Xaa can be any naturally occurring amino acid
  misc_feature (23)..(24): Xaa can be any naturally occurring amino acid
GPVXPXVDPRVREDEAEXAAALXXSPNSAAASFEMDLCIYSSRGGSSYKRDFEGEAYDQRTSSRASDDDDNNRGGGGNTRKKLRLSKEQSAFLEESFKEHNTLNPKQKLALAKQLSL

SEQ ID NO: 4124 - protein, 90 aa, Oryza sativa (japonica cultivar-group)
LSKEQSAFLEESFKEHSTLNPKQKLALAKQLNLRPRQVEVWFQNRRARTKLKQTEVDCEYLKRCCETLTEENRRLQKELAELRALKTVHP

SEQ ID NO: 4125 - protein, 292 aa, Arabidopsis thaliana
MGSSSKNIEQAQECCYLEWMSLQSQRIPELKQLLAQRRSHGDEDNDNKLRELTGKIIGDFKNYAAKRADLAHRCSSNYYAPTWNSPLENALIWMGGCRPSSFFRLVYALCGSQTEIRVTQFLRNIDGYESSGGGGGASLSDLSAEQLAKINVLHVKIIDEEEKMTKKVSSLQEDAADIPIATVAYEMENVGESNVVVDQALDKQEEAMARLLVEADNLRVDTLAKILGILSPVQGADFLLAGKKLHLSMHEWGTMRDRRRRDCMVDTEVIFDACTTVNSGPRPTETTNNERN

SEQ ID NO: 4126 - protein, 193 aa, Arabidopsis thaliana
MGSSSKNTEQAQECCYLEWMSLQSQRIPELKQLLAQRRSHGDEDNDNKLRELTGKIIGDFKNYAAKRADLAHRCSSNYYAPTWNSPLENALIWMGGCRPSSFFRLVYALCGSQTEIRVTQFLRNIDGYESSGGGGASLSDLSAEQLAKINVLHVKIIDEEEKMTKKVSSLQEDAADIPIATVAYEMEMSESLT

SEQ ID NO: 4127 - protein, 254 aa, Brassica rapa subsp. pekinensis
MGRGRVEMKRIENKINRQVTFSKRRAGLLKKAHEISILCDAEVSLIVFSHKGKLFEYSSESCMEKVLERYERYSYAEKQLKAPDSHVNAQTNWSMEYSRLKAKIELLERNQRHYLGEDLESISIKELQNLEQQLDTSLKHIRSRKNQLMHESLNHLQRKEKEILEENSMLTKQIKERESILRTHQNQSEQQNRSHHVAPQPQPQLNPYMISHQASPFLSMGGMYQGEDPTAVRRNRLDLTLEPIYNCNLGYFAA

SEQ ID NO: 4128 - protein, 248 aa, Oryza sativa (japonica cultivar-group)
MEQLFVDDPAFASSMSSLEADIFSGAGQLPSSPWLDLDLDDDVQDLSMAPTTANAVSSGYGSGGSGSHRKLSHNAYERDRRKQLNELYSSLRALLPDADHTKKLSIPTTVSRVLKYIPELQKQVENLERKKKELTTTSTTNCKPGVLGSQLMSEGMAPIVSATCINDMEIMVQVSLLSNVAGSVLPLSKCIKVLENEGLHFISSSTSSGFGNRTFYSIHLQRSEGTINEECPAFCERLEKVVRNKAKL

SEQ ID NO: 4129 - protein, 717 aa, Cryptococcus neoformans var. neoformans JEC21
MPPHQPGDLEPPPKVPPEIYNTVRQTWVQTWKDFYAWKPPSTLPVEDGWVSMRAEEEDKNLVKDHEDFGKRMAALLEKFEQESGREGKLAEVEFEGAAELKPLQNTNKSPIEWNVHGRPIRPLPPIYSLTPTIDPVPEYAFCIYTPRSILSPDEVIMPFMPTFDDDTLDIPGFETEKEKYSSLFTSCLWDLPGRDADVDIIMFETLKRLEKLEVEKEDIDRTRILPKECLYVESLDLRRDLPPFPLPPQNIDSVTGRKLPDGLNHVVGAKRKWEEPLELIEEDFEDDLEGFEEACCHYPTCTSVMCIRHTRGSSFNAGNQRLPRISSVLPTLSEPCSPTCYSLTSNEATLGERLLSIRLEKEWSESDKQQLIDILSAYEGSRLERICGLKDVFNRTCAEVARQVTSILQDRSRGPSVHEPGADMECSTPSSTSGSLRPLLQRSKSSKAQLIPITNRLPEFVECEHEGECLPGVCSCANGKLPCGRHCSCPSTCTRRHRGCNCRRIAIQEGRPVRDGKICINGKCPCIRSFRECDKELCGSCGAAEELVQDEEILKTTGSFGKDGEWVENKDKMAQGQTFISCGNIALQKAKWPKLRVGISKVAGYGLFADEDIGQHVPVGEYVGEYISEWEGDNRNFAESINKRRYQFTINPQFIIDAGFFGNHTRFINSAQGNNVNCVAHQRAVGHELRILFLTTRPIRRHEEIHFNYGDDFWDNH

SEQ ID NO: 4130 - protein, 826 aa, Oryza sativa
MESGEPDAAQIDVVAGMQEEAPGSMLAMEVTYREVDAATVSVSPVLESVEPDAAKIDVVARMQEEAPGSKLAMEVMYGETGTAAVSVPLVLESREEGSLQESMQRPSSPTMNIEQESMQRPFSPTIGTETSSPEMAPAGSENCKVSWLPLPPPTPLGESMPSLPVAAAPKVLLVMPEEAVESVPSSEALDVEKPASITQAEPSSPNTPPPGFENFKSSWLPLPTTPPPVETTDVLPDVVVTKAVEAPIEEVSRPLPALEVTNMESDTVLSILPTTVLPTEGTEGLLQQPLLRPPSPVVQSEPCLQNEMAPPGFENFKSSSEPCSAEEIAPPGSDNFKSSSEPCLPEEMAPPGFENFKSSSVPCSQGEMAPPGFENFKSSWPPLPTLPQTVPDAAAADALAATVEEAAGPPPALELEAMDVDMDAIHPPPLPFDSGVESLQKPLPRAPSPIMQEAPCSPDRAPPGFETYKSSQLLLPSPSLAQTTNVRQDQSVTEPVSVIEEAPQLLHSVEVMGVHMDAVPPLLPSSESGADGLSPQQFAQPPPAEKDTTTCLPDMVHSGCDNSEPSQLLSLPAVISPVQTPDGLADVPAIDRVAVALEESPQRPLVSGEMEAGTVPIRSSPLKNISEGSLPQLESESHSPTSQAADSLLDASDSKSVAVASEEMSQLPLASQATTTDLVSTTAMQPQSEGIVDESLQPQHPPSSTAHDSPCLQDSVPLVPPPPSPYLNKEVGQMVCGSCRILLAYFRGAGYVHCTCCQTMNYVLEAHEVGKVHCGHCATLLMYPFGAPAVKCSLCLFVTEIGERNVRRRLSIEQPTRTNSSGLAEA

SEQ ID NO: 4131 - protein, 268 aa, Secale cereale
MDVADIASRSGQQQQGHRTVSSEPPKRPAGRTKFHETRHPLYRGVRRRGRVGQWVCEVRVPGIKGSRLWLGTFNTAEMAARAHDAAVLALSGRAACLNFADSAWRMLPVLAAGSFGFDSAREVKAAVAVAVVAFQRKQIIPVAVAVVALQKQQVPVAVAVVALQQRQVPVTVAVVALQKLQVPVAVAVVALQKKQIILPAACLAPEFYMSSGDLLELDEEQWFGGMDAGSYYASLAQGMLVAPPDDRARPENGEQSGVQTPLWSCLFD

SEQ ID NO: 4132 - protein, 395 aa, Oryza sativa
MEPNYSDYHPNSVPFDAYYEHGHGHLDDHGHGHHHLIPAHPEPSYSYGNWSFLHADATATSSSESSSASASSGAAHIVGASGPSASFVRQLHFGGEYYDDDAADISALMEAASISCWTTNGGAGASTSQTTGLEGVEVMRRAAAPAPDNGSSDKEEAARPLIGVRKRPWGKYAAEIRDSTRNGARVWLGTFNTPEQAALAYDQAALSVRGPGAVLNYPLHRVRESLRTLELGAAAAASESPVLTLKRRHRIRKRSTTKKALAGKEADEAPATTSSEGKKKRQVNTTSHSHDGAWRRHLLSSGRLSMEGSTAAGGHGGLAGGRGEAAGSNVRAADDDEDGEAAAGSSVHVANDDDDGSEAAAVSSMHAADNDDEAVAGSGVRMTTTTAARRRSGAG

SEQ ID NO: 4133 - protein, 249 aa, Brassica napus
MDEGGSSHDAESSKKIGRGKIEIKRIENTTNRQVTFCKRRNGLLKKAYELSVLCDAEVALVIFSTRGLLYEYASNSVKGTIERYKKACSDAVNPPTVTEANTKHYQQEASKLRRQIRDIQNSNRHIVGESLGSLNFKELKNLEGRLEKGISRVRSKKSELLVAEIEYMQKREMELQHVNMYLRAKIEQGARLNPEQHGSGVIQGTAVYESGLSSSHDQSQHYNRNYIPVNLLEPNQQFSGQDQPPLQLV

SEQ ID NO: 4134 - protein, 184 aa, Brassica carinata
MLLARDGNRNRDLPSSSSSLPLLPTPTPTPIHKCSVCDKAFSSYQALGGHKASHRKNSSLSQSSGGDDQATSSAITIASHGGGRGGSVKPHVCSICNKSFATGQALGGHKRCHYEGKNGGGGGASSSVSFSEGMGSTSHVSSGSHHHGHHRGFDLNIPPIPEFSTVNGEEEVMSPMPTKKLRLE

SEQ ID NO: 4135 - protein, 208 aa, Oryza sativa (indica cultivar-group)
MVTAAAARRRPSLGRQKIEIRRIESEEARQVCFSKRRAGFFKKASELSILCSADVAAVVFSPAGKAYSFGHPSVEFLLDRFLSSSLPATAGKEEGSSVSVVAELNRQYGELRAMVDAHKARRERAEKTMEKQRQRQPAAWMDPEAEVGRMAPEELMALGTKLVAVQGGVAARADQMLRDALLLGRRPNTTTTTTTRAPPGFFHLHPHF

SEQ ID NO: 4136 - protein, 589 aa, Zea mays
  misc_feature (56)..(56): Xaa can be any naturally occurring amino acid
MESEDDMHDANDSAEDDFYSGGEAGLAASDDGDADYDFADHDSDDSAELLSHRQQXDSSVLSEVDIKRRQEDDINRVSTVLSISKPEACVLLRNYNWSVSKVHDEWFADEERVRKVVGLPEKHIEMPNDREVTCGICFESCPLGSMSAAACGHPFCGTCWRGYISTAISDGPGCLMLRCPDPSCAAAVGQDMINSLADVEDTEKYGRYLRRSYIEDNRKTKWCPAPGCEYAAEFVMGSGSYDVNCNCSYGFCWNCTEEAHRPVDCATVSKWILKNSAESENMNWILANSKPCPKCKRPIEKNQGCMHITCTPPCKFEFCWLCLGPWSEHGERTGGFYACNRYESARQEGVYDESERRREMAKNSLERYTHYYERWAANQSSRQKALGDLQSLQNDKLERLSDIQSQPESQLKFIIEAWLQIVECRRVLKWTYAYGFYLPEHEHAKRQFFEYLQGEAESGLERLHQCAEKELQIYLDAESPSKDFNDFRTKLAGLTSVTRNYFENLVRALETGLNDVGPSTSHGTCSKSATSKSLGGKSKSGKNRASSTSSKSGGSSRGVDDSNIWTCDQCTYANPKSARACQACDHQHR

SEQ ID NO: 4137 - protein, 233 aa, Glycine max
MALEALQSPTTATPSFSPFEETSLSYLETPWTKGKRSKRSRTEQQLQHPSCTEEEYLALCLIMLARGGAGSVSTAKPAVSDNNSAPLSAAKLSYKCSVCNKAFSSYQALGGHEASHRKLAGENHPTSSAVTTSSASNGGGRTHECSICHKTFSTGQALGGHKRCHYEGGNSAVTASEGVGSTHTGSHRDFDLNLPAFPDFSARFFVDDEVTSPHPSKKSRFNLTIPKIEIPQY

SEQ ID NO: 4138 - protein, 310 aa, Hevea brasiliensis
MDRGIEILSPASYLQNSNWLFPETRATKWTPEENKQFENALALYDKDEPDRWQKVAAVIPGKTVGDVIKQYRELEEDVSDIEAGLIPIPGYSSSDAFTLEWFNNNQGYDGFRHYYTPGGKRTTAARSSEQERKKGVPWTEEEHRQFLMGLQKYGKGDWRNISRNFVTTRTPTQVASHAQKYFIRQSTGGKDERRSSIHDITTVNLPDTKSPSPDEKKSSPDHSTTSLQSQPQQKMVGMAKGLIDWKPQNEGGGAAGVFSQANGNLLMAPLCGISSYGQRLQEQNLLRGTLPGYQFAPYNLIFQMQPMQRQ

SEQ ID NO: 4139 - protein, 245 aa, Phalaenopsis amabilis
MGRGRVQLKRIENKINQQVTFSKRRSGLLKKAHEISVLCDADVALIIFSNKGKLCEYSTDSSMEKILERYEHYSYTERALYSNEDNPQADWRLEYNKMKAKVESLQKSQRHLMGEQLDYLSIKELQHLEQQLESSLKHIRSRKTQLMVDSISELQKKEKLLLEQNKTLQDMAKAKAKALVQNAAWEQQNKSQYSSEPPHAVISDSVPTPTSRTFQTRANGEESPQPQLRLGNSLLPPWMLSHVNG

SEQ ID NO: 4140 - protein, 353 aa, Triticum aestivum
LPGESHHRLTSQPVLPLTVTAEARRSHRSRQGRAAAAADRPVRATCTEPHRGTPLLPPGRRRRRLPPGAAASAPASPPPAPAGCCPGPRGADRPAMASPFPPGSSSSSASSPLSYLIPRQPPPSSVVAQGFSCGALVQQAGGLYGADGVGALEVRQGGRHAGHPPLPRPPPRQCPRCRSANTKFCYYNNYSRKQPRYFCRACRRHWTEGGTLRDVPVGGGRKNRRNGGGKGGAKAPSTVVTTEVSAAAATAATQGSGAGGPAGAVDAFIPADILRQMLSQSASFTAVGGGGGYGIDLSAWQQMSGAAPAPQGASDVGAAGGTAPAADANCGTGAQYWSGWQLQDDMPGFDGTF

SEQ ID NO: 4141 - protein, 250 aa, Phalaenopsis amabilis
MGRGKVQLKRIENKINRQVTFSKRRSGLLKKAHEISVPCDAEVALVIFSAKGKLYGYSTDSCMDRILDRYERYCYAEKALQITEPESQGDICNEYGKLKNKIEALQKSRSHLMGEQLDSLSIKELQHLEQQLETALNHIRTQRIQLLLNCITEFQRKEKSLLEHNSLLEAKLCSFQLDPQITETATQNPNRKQQKQDQVNSSPSPFLPPNHLPTLNLGTYPASDGEEAEDPTLLQMNSISLPPWMLRSST

SEQ ID NO: 4142 - protein, 336 aa, Zea mays
MASAPSPFFPPNFLLQMQQTPSDHEHQEQHHHHHHHKHHLAAPPLHPHHNPFLPSSQCPSLQDFRGMAPIMLGKRPMYGADVQVVGGEEVNGCGGVNEDELSDDGSQAGGEKKRRLNVEQVRTLEKNFELGNKLEPERKLQLARALGLQPRQVAIWFQNRRARWKTKQLEKDYDALKRQLDAVKADNDALLSHNKKLQAEILSLKGREAGGSSELINLNKETEASCSNRSENSSEINLDISRAPASEAPLDPTPPPGAGGGGMIPFYPPSVGGRPASAAGVDIDQLLHTSAPKLEQHGSGGAVVVQAAETASFGNLLCGVDEPPPFWPWADHQHFH

SEQ ID NO: 4143 - protein, 376 aa, Glycine max
RFQVPSNWLWDLHLEMKDRQRWRAEEDALLRAYVKQYGPREWNLVSQRMNTPLNRDAKSCLERWKNYLKPGIKKGSLTEEEQRLVINLQATHGNKWKKIAAQVPGRTAKRLGKWWEVFKEKQQRETKGNSCTIDPISDSKYEHILESFAEKLVKERPSTSTSTSFVMATSNSSFLHADAPAPAPALLPSWLSNSNGTAPVRPPSPSVTLSLSPSTVAAPPPWMQPPVRGQDNASPLVLGNVAPHGAVLAFGENMVMSELVECCKELDEVHHALAGHKKEAAWRLSRVELQLESEKAGRRREKMEEIEAKIKALREEQTAALDRIEAEYREQLAGLRRDAESKEQKLAEQWAAKHLRLTKFLEQVGCRSRLTEPNGR

SEQ ID NO: 4144 - protein, 338 aa, Arachis hypogaea
MAVYDQSGDRNRTQIDTSRKRKSRSRGDGTTVAERLKRWKEYNETVEEVSTKKRKVPAKGSKKGCVKGKGGPENSRCSFRGVRQRIWGKWVAEIREPNRGSRLWLGTFPTAQEAASAYDEAAKAMYGPLARLNFPRSDASEVTSTSSQSEVCTVETPGCVHVKTEDPDCESKPFSGGVEPMYCLENGAEEMKRGVKADKHWLSEFEHNYWSDILKEKEKQKEQGIVGTCQQQQQDSLSVADYGWPNDVDQSHLDSSDMFDVDELLRDLNGDDVFAGLNQDRYPWNSVANGSYRPESQQSGFDPLQSLNYGIPPFQLEGKDGNGFFDDLSYLDLENVDA

SEQ ID NO: 4145 - protein, 842 aa, Pinus sylvestris
MAACIAMNTRFRGVDTSGEEVFVVGETDSNNSMIIPASEGENRRKRTGMELNGPLFRRINPSESSDYGQIKWNNLSSGLRESQTPVPLASAAGWQYPSSATVDSVSHRISAPSRTPGLGLANSVLCGESNGQPFNGAYSSMPFFQNSNMERQVSNSCSQWNKWGSVVQPEVGLGCDGTGQQLSSLNAVQTMDEAAVWVDGMIKDLMMQSSPNVSMAQIIQSLQEIAPLYNPHIASVLEYRLRSLGQSELGLAGNTQIGRDQNVGMNVSSDGRGLKRSMDQSDHHRRDMNSQQQIMVDWKSIGANPDSARSARASQLDDDENRLLDNIHGRGLDVDDQRLRRGNDDLRLRIQSTESHDIQREHQPDSALKLYLDSSGYDQTPWASSKDQFSETAFMANQSMWVQPRQPDNNSQPPVLSLQHQANEDDPLRVAPSNDSYITMNRRINTNSNQDPSGNQTPQQQGPSDITASDEEGLHLLALLLQCAEAVSADNFEEANTILPQITELSTPYGNSVQRVAAYFAEAMSARLVSSCIGMYSPLPPIHMSQSQKIVNAFQVFNGISPFVKFSHFTANQAIQEAFEREQRVHIIDLDIMQGLQWPGLFHILASRPGGPPHVRITGLGTSLEALEATGKRLSDFAHTLNLPFEFHPVADKVGKLDPERLKVNRGDALAVHWLHHSLYDVTGSDTNTLRLLQRLSPKVITVVEQDLSHGGSFLSRFVEAIHYYSALFDSLGASYPEDSHDRHLVEQQLLSREIKNILAVGGPARTGEIKFDNWRDQLKQTGFKPISLAGNAATQATLLLGMFPCQGYTLMEENGTLKLGWKGLCLLTASAWRPAHHGLIY

SEQ ID NO: 4146 - protein, 106 aa, Phillyrea latifolia
LNLRPRQVEVWFQNRRARTKLKQTEVDCEYLKRCCETLTEENRRLQKELQELRALKTSQPFYMQLPATTLTMCPSCERVATTPFLFWHHQHHHHNPSTTHHHHHHH

SEQ ID NO: 4147 - protein, 270 aa, Secale cereale
MDVADIASPSGQQEQGHRTVSSEPPKRPAGRTKFHETRHPLYRGVRRRGRVGQWVCEVRVPGIKGSRLWLGTFNTAEMAARAHDAAVLALSCRAACLNFADSAWRMLPVLAAGSFGFGSPREIKAAVAVAVIAFQRKQIIPVAVAVVALQQQQVPVAVAVVALKQKQVPVAVAVVALQQLHVPVAVAVVALQQQQIILPVACLAPEFYMSSGDLLELDEEHWFGGMDAGSYYASLAQGMLVAPPDERARPENGEQERRPDAAMELFVRLI

SEQ ID NO: 4148 - protein, 304 aa, Solanum demissum
MAFFPTNFMLQTPHHEDEHQPSTSLNPILPSCSPQDFHGIASFLGKRSMSFSGMDGNNACEENHGEDDLSDDGSQAGEKKRRLNMEQVKTLEKNFELGNKLEPERKMQLARALGLQPRQIAIWFQNRRARWKTKQLEKDYEVLKRQFDAIKAENDALQTQNQKLHAEIMSLKNREQPTESINLNKETEGSCSNRSENSSEIKLDISRTPAIDSPLSNHHPNISSRPFFPPSMIRSNNNNNGVVVSHQLFHINSSSSRQDLKLMDQNTTTTNNNSSVKEESLSNMFCGIDDQTSFWPWLEQQHFN

SEQ ID NO: 4149 - protein, 244 aa, Betula pendula
MGRGRVQLKRIENKINRQVTFSKRRSGLLKKAHEISVLCDAEVALIVFSTKGKLFEYSTDSCMERILERYERYSYADRQLLANDLEQNGSWTLEHAKLKARIEVLQRNQKHFVGEDLDSLSLKELQNLEQQLDSALKHIRSRKNQLMYESISELQRKDKALQEQNNVLAKKVKEKEKELAQQAQWEQQSHTLDSVPSLLPQPLQSSLNIGGSQQARGNGRVDEGTPPHRANALLPPWMLRHLNQ

SEQ ID NO: 4150 - protein, 241 aa, Ipomoea batatas
MGRGRVELKRIENKISRQVTFSKRRSGLLKKAHEISVLCDAEVGLIVFSTKGKLFEYSTDSSMENILDRYERYSYAEQRMTTNDSEQQQNWSCQYPKLVSRIELLQRSTRNFLGDDLEPLGLRELQSLEQQLDTGLKRIRTRKNQLMHESISELQKKERALQVQNNILAKQLEQQKLVLNSASTSMPPQPLVSPLPLPNLTIGSIARATEAAKNSENRGQAPPCSTSLVPPWMLRHPNNKD

SEQ ID NO: 4151 - protein, 516 aa, Brassica oleracea
MLYPQVHCSPQFQVIDNKKGFSDTPSKESFFTLESSTASGPLPSYESPSVSITSGRSPFSPQASCISDLHPSPENIYGSPLSGASSHVYDEAHVKNKIRELEVSLLSVDPKVEEYSGFTPAGKSWNWDELLALTPQLDLKEVLVEAARAVSEGDFAAACGFIDVLEQMVSVSGTPIQRLGTYMAEGLRARLQGTGGNIYRALKCNEPTGRELMSYMGVLYEICPYWKFAYNAANAAILEAVAGEKRVHIIDFQIAQGSQYMFLINELAKRPGGPPLLRVTGVDDSQSRYARGGGLSLIGEKLADMAQSRGVPFEFHDAIMSGCKVHREHLGVEPGFAVVVNFPYVLHHMPDESVSVENHRDRLLHLIKSLGPKLVTLVEQESNTNTSPFLSRFVETLDYYTAMFESIDAARPRDDKQRISAEQHCVARDIVNMIACEEAERVERHEVLGKWRVRMMMAGFMGWPVSSSAAFAASEMLKGYDKNYKLGESEGALYLFWKRRPMATCSAWKPNPNQIV

SEQ ID NO: 4152 - protein, 315 aa, Glycine max
MQGKEMEGLSSSSAIAQKTWELENNIIPMDTPGGAAISSTTTTTSADDSIFYYDEAGQNEFQRDKPWANDPHYFKRVKISALALLKMVVHARSGGTIEVMGLMQGKTDADAIIVMDAFALPVEGTETRVNAQADAYEYMVDYSQTNKQAGRLENVVGWYHSHPGYGCWLSGIDVSTQMLNQQFQEPFLAVVIDPTRTVSAGKVEIGAFRTYPEGYKPPDEPISEYQTIPLNKIEDFGVHCKQVFFSFFFSNIYIQLPWFIFIYLFFFFDFTCVILQYYALDITYFKSSLDSHLLDLLWNKYWVNTLSSSPLLGNG

SEQ ID NO: 4153 - protein, 227 aa, Brassica napus
  misc_feature (194)..(194): Xaa can be any naturally occurring amino acid
  misc_feature (205)..(205): Xaa can be any naturally occurring amino acid
MVRLRSGGDSGPGPGPDEAGSSGDHGGVRRFPLAAQPEIMRAAEKDDQYASFIHEACRDAFRHLFGTRIALAYQKEMKLVGQMLYFVLTTGSGQQTLGEEYCDIIQVAGPYGLSPTPARRALFILYQTAVPYIAERISSRAATQAFTFDEDDQSPRMTDHPSSASSVLSRFKDRLERFCHRAIRRWPVVLPAAXREVLQVLLRAXNLMLFYFEGLYYHISKRALWGS

SEQ ID NO: 4154 - protein, 342 aa, Oryza sativa (japonica cultivar-group)
MAKRAGGARKKLRRGLWSPEEDEKLMNHIAKYGHGCWSSVPKLAGLERCGKSCRLRWINYLRPDLKRGAFSQEEEDLIIHLHSMLGNKWSQIAAQLPGRTDNEVKNFWNSYIKKKLRQRGIDPATHKPLAEVVAAAACARTPAVFSDAELILSSIGAQPPPESYDGSRYSTECGAASVGGDGSLSSLSGYSQATAEFAVDGASASALLHCGGGGPTSSGGGAPPAPTAAVIPSVSSSSTLNSMVGLSPAATTTTTTTDEQYGNTNHLPWLELGPSTTTPSSSAAAATFDHYGAALDELKWSDYVFDGYNHQLPPYNHGGIYGGGDSKDTAVHFDAHALGNWC

SEQ ID NO: 4155 - protein, 156 aa, Brassica napus
MASGSSSICGIGHLQKECYYEWMRTQSKHIVDLKEVLMSQRSNAYDHHKLEELVGRIVNDFQNYADKRSELADRSCSSYFAPSWNSSLENGLLWMGGCRPSSFMRIIYALCGSHAETQLSQYLPKMDGEVVDGHDGDSSMSELNATQLAKINDLHG

SEQ ID NO: 4156 - protein, 211 aa, Arabidopsis thaliana
MARGKIQLKRIENPVHRQVTFCKRRTGLLKKAKELSVLCDAEIGVVIFSPQGKLFELATKGTMEGMIDKYMKCTGGGRGSSSATFTAQEQLQPPNLDPKDEINVLKQEIEMLQKGISYMFGGGDGAMNLEELLLLEKHLEYWISQIRSAKMDVMLQEIQSLRNKEGVLKNTNKYLLEKIEENNNSILDANFAVMETNYSYPLTMPSEIFQF

SEQ ID NO: 4157 - protein, 269 aa, Oryza sativa (japonica cultivar-group)
MSSASSMEALHAAVLKEEQQQHEVEEATVVTSSSATSGEEGGHLPQGWAKRKRSRRQRSEEENLALCLLMLARGGHHRVQAPPPLSASAPPPAGAEFKCSVCGKSFSSYQALGGHKTSHRVKLPTPPAAPVLAPAPVAALLPSAEDREPATSSTAASSDGMTNRVHRCSICQKEFPTGQALGGHKRKHYDGGVGAGAGASSTELLATVAAESEVGSSGNGQSATRAFDLNLPAVPEFVWRPCSKGKKMWDEEEEVQSPLAFKKPRLLTA

SEQ ID NO: 4158 - protein, 162 aa, Arabidopsis thaliana
MDYSENVQNKNFTPISQPPNLTRDQEHAIMVSTLRQVISNTGGDTSSSHYIAASEALPPSDAGPCPLCGVTSCYGCAFPQHEEIKQEKKHKGVRKKPSGKWSAEIWDPSTRTRRWLGTFPTAEMAADAYDEAAAALVEKRSARRGSKKGEGSIHQEVGGGDD

SEQ ID NO: 4159 - protein, 220 aa, Myxococcus xanthus DK 1622
MTSPNFIPSTKPLPFELHPSSIQGQGAFAIRRIRKGTRIIEYLGERITQAEADVRYDDESMARHHTFLFNLDKRTVLDAGTIHNEARYINHSCAPNCEALIEKGHIYIYALTSIEPGEELVYDYGYERTEDMGPEAEALYVCRCGAPNCRGTILAPAKKAPARKTSAKKAKTSSTSRKKSASKSRGNKGAGGKKAAGKKSSAGTRKSTQRAKSPSRKRAS

SEQ ID NO: 4160 - protein, 238 aa, Populus tomentosa
MGRGKIEIEKIENPTNRQVTYSKRRNGIFKKAQELTVLCDAKVSLIMFSNTNKLNEYISPSTSTKKIYDQYQNTLGIDLWGTQYEKMQEHLRKLNDINHKLRKEIRQTRGEGLNDLSIDHLRGLEQHMTEALNGVRGRKFHVIKTQNETYRKKVKNLEERHGNLLMEYEAKLEDLQGGLVDNEAAVALVDGASDNEAAVALADGASNLYAIRLHHGHNHHHPNLHLEDGFGAHELRLP

SEQ ID NO: 4161 - protein, 320 aa, Arabidopsis thaliana
  misc_feature (216)..(216): Xaa can be any naturally occurring amino acid
MSERDDGLGLSLSLSLGFNQKDPSSRLNPMPLASYASSSHMQHMQQSNYNHPQKIQNTWINMFQSSERNSDMRSFLRGIDVNRAPSTVVVDVEDEGAGVSSPNSTVSSVMSGKKSERELMAAAGAVGGGGRVEDNEIERASCSLGGGSDDEDGSGNGDDSSRKKLRLSKEQALVLEETFKEHSTLNPKQKMALAKQLNLRTRQVEVWFQNRRARTXKLKQTEVDCEYLKRCCENLTDENRRLQKEVSELRALKLSPHLYMHMKPPTTLTMCPSCERVAVTSSSSSVAPPVMNSSSPMGPMSPMSPWAAMPLRQRPAAGSH

SEQ ID NO: 4162 - protein, 228 aa, Petunia x hybrida
MGRGKIEIKRIENNTNRQVTFCKRRNGLLKKAYELSVLCDAEIALIVFSTRGRVYEYANNNIKGTIERYKKATAETSNACTTQELNAQFYQQESKKLRQQIQLLQNTNRHLVGEGLSALNVRELKQLENRLERGITRIRSKKHEMILAETENLQKREIQLEQENTFLRSKIAENERLQELSMMPATGQEYNAFQQYFARNMLQLNMMEGGVPSYDPLPAHDKKSLQLE

SEQ ID NO: 4163 - protein, 238 aa, Arabidopsis thaliana; identical to SEQ ID NO: 146

SEQ ID NO: 4164 - protein, 446 aa, Arabidopsis thaliana
MSTVSSDPAHAKKSRNSRKALKQKNEIVESSPVSDKGKETKSFEKDLMEMQAMLEKMKIEKEKTEDLLKEKDEILRKKEVEQEKLKTELKKLQKMKEFKPNMTFAFSQSLAQTEEEKKGKKKKKDCAETKRPSTPYILWCKDNWNEVKKQNPEADFKETSNILGAKWKGISAEEKKPYEEKYQADKEAYLQVITKEKREREAMKLLDDEQKQKTAMELLDQYLHFVQEAEHDNKKKAKKIKDPLKPKQPISAYLIYANERRAALKGENKSVIEVAKMAGEEWKNLSEEKKAPYDQMAKKNKEIYLQEMEGYKRTKEEEAMSQKKEEEEFMKLHKQEALQLLKKKEKTDNIIKKTKETAKNKKKNENVDPNKPKKPTSSYFLFCKDARKSVLEEHPGINNSTVTAHISLKWMELGEEEKQVYNSKAAELMEAYKKEVEEYNKTKTSS

SEQ ID NO: 4165 - protein, 815 aa, Aspergillus nidulans FGSC A4
MGVIRKKTATRGTEAGTKYHCDVCSVDVTSTVIEQNSVPIFQEDWGADEELLLLEGAEIYGLGSWADIADHIGGYRTKEEVRDHYLSTYIDSPNFPLPERADPEDTRLQDSISKEEFQARKKRRIEERKEAAKAAPPTTPKQKPTASVPACHEVQGYMPGRLEFETEFMNDAEEAVQHMTFEPGAGETPNGETDAEMELKMTVVDIYNTRLTARTERKKILFEHNLLEYRKNTALEKKRTKEERELLNKAKPFARMMNHEDFEEFNKGLEYEHNLRLAIAQLQEWRQMGIADLKGGEKYEQEKQQRAQRLMPQGSFDRFASTRPKQNQQSEQPTAANQLTTPELPLRLQKAADASSKAQEPNVPLNDFDRMFAANGDGPATQPPKTKFVVQPLNGVIPWKLENEGAPDLHLLTKEEVELCDALHIQPKPYLVIKETLLKESMKAGGSLKKKDARALCKRQREEGVGSCRRWDTNHHEALNLEAKSDSLTSFIKYHFSLVNHYEVQMSRRQGYIGHWILPRNSNSSAGLNPKDLVLTTKRTKRTMSFKSPPPTPTHSTLTFPAPTILLVTLSRPKDLNCINSTGHNELHAIWEWMDEEPSLRVGIITGEGRAFCAGADLKEWNASTQSSKPRSPMPSSGFGGLSRRNGKKPIIAAVNGLCLGGGCEMITNTDVVIASEKAFFGFPEVQRGVVAWAGALPRIVRTVGKQRAMEMVLTGRRVEASEAEKWGFVNEVVSAEKVVKRAVEVALQIAGNSPDAVIVSRQGVKMGWEGVSAEEGTRLLVENWEKKLTAGENIKEGLKAFVEKRKPEWKESKL

SEQ ID NO: 4166 - protein, 241 aa, Zea mays
RNGLLKKAYELSVLCDAEVALVVFSSRGRLYEYANNSVKATIERYKKAHAVGSSSGPPLLEHNAQQFYQQESAKLRNQIQMLQNTNRHLVGDSVGNLSLKELKQLESRLEKGISKIRARKSELLAAEINYMAKRETELQNDHMNLRTKIEEGEQQLQQVTVAQSVAAAAATDVELNPFLEMDTKCFFPGGPFATLDMKCFFPGSLQMLEAQQRQMLATELNLGYQLAPPDTDVANNNPQQF

SEQ ID NO: 4167 - protein, 295 aa, Zea mays
  misc_feature (220)..(220): Xaa can be any naturally occurring amino acid
MGQPVTRRRERDEEAELDLPPGFRFHPTDDELVEHYLCRKAAGQRLPVPIIAEVDLYRFDPWDLPERALFGTREWYFFTPRDRKYPNGSRPNRAAGDGYWKATGADKPVAPRAAAARTLGIKKALVFYAGKAPRGVKTDWIMHEYRLADPGGRAKKGSLRLDDWVLCRLYNKKNEWEKMRLGKGAAAGEEAMDVSISHSQTHSWGETRTPESEIVDNDPXPAGDDVPKKEALDAGGSARSSDLFVDLSYDDIQGMYSGLDMLPPAGEDFYSSLFASPRVRGNQPTGAAGSWAPSE

SEQ ID NO: 4168 - protein, 363 aa, Solanum demissum
MDEVMLPGFRFHPTDEELVGFYLRRKVQQKPISIELIKQLDIYKYDPWDLPKLAAVGEKEWYFYCPRDRKYRNSARPNRVTGAGFWKATGRAAKGIKTDWMMHEFRLPSITDSTAPKRFLDKHIPPNDSWAICRIFKKANSNAHRALSHSWVSPPQVLPQNNTTSHDFLTSSHFTNNSNEMSSFIHKTSSTSPIQFNDLLQNSSNNNMSSSFTTLDLPLYKTLNSMSNHNNDPITSYTFSSSCVDNMNNIDASSLLLNMSSSIFGDYSIALPENIEGGGVHDDTTTTTFKEANNVIINNMEHMEELQWGNAVRSNNIGVIPLMNNFPLNMAADAWKTNLLWDSSSPCPSSEMSTSYSTNKCYT

SEQ ID NO: 4169 - protein, 335 aa, Zea mays
TTQTQTQPPPPPEQGLRCPRCDSPNTKFCYYNNYSLSQPRYFCKTCRRYWTKGGALRNVPVGGGCRKNKRSRSAAAVAAAAAAAAAASSSRLSLNLPPEAAAAADQQAARLGFLGAHHPVASSTIDGGGPAAADYHHQQAGAAAVGMIALPRLHAPGVVGQYVPFGEWHPGTAGDVVTGGAAVSSSSSSIASSIESLSFINQDLHWKLQQQRLASMFLGAPTSAAAAAAAHADSAAHVGGAFMQMSVAESTMTMPPPPLATSWFMDSSCYALPSPTMTAHASTAAAVAAATGTCNVVNGAGAGDDDSAASNNNNNCGPGSAIQSWGDMSAFAMLP

SEQ ID NO: 4170 - protein, 273 aa, Zea mays
FPADREALPHHHHPMLNMMTDLSCGPSSKVKEQVAAAPTGSGDRQGQGRGKIEIKRIENTTNRQVTFCKRRNGLLKKAYELSVLCDAEVALVVFSSRGRLYEYANNSVKSTIERYKKANSDSSNSGTVAEVNAQYYQQESSKLRQMIHSLQNANTRNIVGDSIHTMGLRDLKQMEGKLEKAISKIRARKNELLYAEVDYMQKREMDLQTDNMYLTSKIAESNETGQPAMHMMGVPPPTSEYDHMAPFDSRNFLQVSMPQHYSHQLQPTTLQLG

SEQ ID NO: 4171 - protein, 301 aa, Solanum lycopersicum
MNKGANGNQQLELPAGFRFHPTDDELVQHYLCRKCAGQSIAVSIIAEIDLYKFDPWQLPEKALYGEKEWYFFSPRDRKYPNGSRPNRAAGTGYWKATGADKPVGKPKTLGIKKALVFYAGKAPRGIKTNWIMHEYRLANVDRSAGKNNNLRLDDWVLCRIYNKKGTLEKHYNVDNKETTSFGEFDEEIKPKILPTQLAPMPPRPRSTPANDYFYFESSESMTRMHTTNSSSGSEHVLSPCDKEVQSAPKWDEDHRNTLDFQLNYLDGLLNEPFETQMQQQICNFDQFNNFQDMFLYMQKPY

SEQ ID NO: 4172 - protein, 199 aa, Pinus radiata
  misc_feature (133)..(133): Xaa can be any naturally occurring amino acid
MARGKTQMRKIESATSRQVTFSKRRNGLMKKAYELSVLCDAQLGLIVFSPRGKVYEFSSTCMQKMLARYEKCSEGSDTSTSKEQDVQCLKRESANMEERIEILESMQRKMLGEELASCALKDLNQLESQVERXLRNVRARKERILSEENAFLSKKFVDPQSFSTTPGSESGSIQNSEVETQLVMRPPCTNAHFLINSSH

SEQ ID NO: 4173 - protein, 193 aa, Nicotiana tabacum
MAFAGTTQKCMACDKTVYLVDKLTADNRIYHKACFRCHHCKATLKLGNSNSFEGVLYCRPHLIGLFKQTGSLDKSFEGTPKIVRPQKPIDSEKPQVAKVTSMFGGTREKCFGCKKTVYPTEKVSVNGTPYHKSCFKCSHGGCVISPSNYIAHEGRLYCKHHHIQLIKEKGNLSKLEGDHEMNSTTTTEVTAES

SEQ ID NO: 4174 - protein, 494 aa, Oryza sativa (indica cultivar-group)
MAALRQGDDPAIKLFGRTIPLLLDPAAAAAAAAADEENSVLENSVLSFLDFLATFGVMPNLGNGVKTNNDLPLVSDKLLIVKGIPFCPNNSKKNDLQGISRPDGRIEIDSMTEDVKTEPDGSVPEKILKKPDKILPCPRCNSMETKFCYFNNYNVHQPRHFCRNCQRYWTAGGAMRNVPVGAGRRRNKHVSKYCQAMMTCNNTVAPGDVSDVVHHQVITHGSSLLPATLKENETPTEFISEVPPCKSSASILDIGEPNDTDLVPLASGDNKEEKSCASSVVVSSCSENLMPDNAIMKEPNNRSGCCNGVALPFPTGPALVLPWSLGWNSVALMPATQCSMQPVLGLKDGIPCPPSWPPQLMVPAPGICTPVVPIPLVPPLWSCFPGWPNGMWNAQCPGGSSSLVLGKHSREESLQEEEKTRNYLWVPKTLRIDDPAEAAKSSIWATLGIKPDDKGIFKSFQPNVAKNGTAPESPQALQANPAAFSRSQSFQETT

SEQ ID NO: 4175 - protein, 193 aa, Nicotiana tabacum
MAFAGTTQKCMACDKTVYLVDKFTADNRIYHKACFRCHHCKGTLKLGNYNSFEGVLYCRPHFDQLFKQTGSLDKSFEGTPKIVKPQKPIDSEKPQVAKVTSMFGGTREKCFGCKKTVYPTEKVSVNGTPYHKSCFKCSHGGCVISPSNYIAHEGRLYCKHHHIQLIKEKGNLSKLEGDHEMNSTTTTEVTAES

SEQ ID NO: 4176 - protein, 151 aa, Triticum aestivum
MAPRTSDKTATPPAAGAAATGLALGVGGGNGGGVGTHYRGVRKRPWGRYAAEIRDPAKKSRVWLGTYDTAEEAARAYDAAAREYRGNKAKTNFPFASASAPPAAAAALTGDGSRSSNSSTVESFGGDVQAPMQAMPLPPSLELDLFHRAEL

SEQ ID NO: 4177 - protein, 320 aa, Zea mays
  misc_feature (93)..(93): Xaa can be any naturally occurring amino acid
  misc_feature (153)..(153): Xaa can be any naturally occurring amino acid
  misc_feature (183)..(183): Xaa can be any naturally occurring amino acid
  misc_feature (212)..(212): Xaa can be any naturally occurring amino acid
  misc_feature (290)..(290): Xaa can be any naturally occurring amino acid
MGLPMRRERDAEAELNLPPGFRFHPTDDELVEHYLCRKAAGQRLPVPIIAEVDLYRFDPWDLPERALFGAREWYFFTPRDRKYPNGSRPNRGXAATGYWKATGADKPVAPRGRTLGIKKALVFYAGKAPRGVKTDWIMHEYRLADAGRAAAAXKKGSLRLDDWVLCRLYNKKNEWEKMQLGKXPSPGVGATKEEAMDMATSHTHSHSQSHSXHSHSWGETRTPESEIVDNDPFPELDSFPAFQDPAMMMTVPKEEQVDGCSAKSGNLFVDLSYDDIQGMYSGLDMLPPPXGEDFYSSLFASPRVKGNPARRSRRVGTVLS

SEQ ID NO: 4178 - protein, 243 aa, Zea mays
MEHYDSYLCSGSMHSYGGVGGATDAALDAGGDDMQRLLNALMDDMAAESDSFSDDMEAASSESSSSACSANSQQEATRRPQQQPDGGHSNGSNKSSKKQHQQQPPAPYIGVRRRPWGKFAAEIRDSTRKGARVWLGTFDSPEAAAMAYDQAAFSVRGAAAVLNFPVERVQESLRALALSSASSAAGSPVLALKCRHSIRKRSPTRTRTRTRSRSGSNSVVELEDLGADYLDELLRVSSEFHWQ

SEQ ID NO: 4179 - protein, 269 aa, Oryza sativa (japonica cultivar-group)
MRSPAALLPVVADGGGGVGVEEEMDVDEDMAMCGGRGGGGGEKKRRLSVEQVRALERSFETENKLEPERKARLARDLGLQPRQVAVWFQNRRARWKTKQLERDYAALRQSYDALRADHDALRRDKDALLAEIKELKGKLGDEDAAASFSSVKEEEDPAASDADPPATGAPQGSSESDSSAVLNDAEILPHKPAPAAAADAAASEETEAVVTGAALLHHAEVFFHGQLLKVDDDEAAFLGDDGAACGGFFADEHLPSLPWWAEPTEQWTT

SEQ ID NO: 4180 - protein, 428 aa, Zea mays
  misc_feature (377)..(377): Xaa can be any naturally occurring amino acid
MVAECQGGGDFLIKLFGKTIPVPEPEPESGDAKDLQQSSSNWTEIVDADDDPKKHSDGDAARQREKLREPDKVLPCPRCNSADTKFCYFNNYNAKQPRHFCKRCQRYWTAGGAMRNVPVGAGRRKNKNAAASHSHLLHRTTTTANGAMLSFAPPGPGLACLCLDLAAQFGHLAPVRDAAGTPSRPCTCSEGSTDRDGTSSVVDESAASGDGPVQLHHHPASVNTGWPPYSSPPPAAPYFSPGISIPVYPAAPGYWGCMVPGAWSLPWPVQPQPPSSRSQGQGLSSSSSPPPPTTTTIGTPSVSSSSGAADFDSHALGLGLGKHPRDRDGDDGRKRNGSAHGSGSAKVWAPKTIRIDDVDEVARSSIWSLVGVRGDRXAAGRSRAGDKLGTVFEPRGLQATKKAMATSSPLLHANPVALTRSVAFHEGS

SEQ ID NO: 4181 - protein, 129 aa, Brassica napus
  misc_feature (114)..(114): Xaa can be any naturally occurring amino acid
  misc_feature (117)..(117): Xaa can be any naturally occurring amino acid
HHPIPETPSHRRFSSSPTRILPPMELEGNFFMSDAQQAHDDSFLAKPKPNLVTGPIDGHNANESGCFDCNICLDTAHDPVVTLCGHLFCWPCIYKWLHVQLSSVSIDQHHSNCXVCXSNIAVTSLVPLY

SEQ ID NO: 4182 - protein, 312 aa, Glycine max
MMGLDQDASSNSGLHLILGLALTATTTTTPSLPSISNKLDHVDHHHHLITLRPTTKSPYNSSEAEPSLTLGLSRESYLKVPKNIIGQNSNNKVSSCDDPLDHLSTQTNSPHHSAVSSFSSGRVKRERDLSCEEVVDATEIDQRDHSCEGIVRATDEDEDGTAARKKLRLSKEQSALLEESFKQHSTLNPKQKQALAKQLNLRPRQVEVWFQNRRARTKLKQTEVDCEFLKKCCETLTDENRRLQKELQELKALKLAQPLYMPMPAATLTMCPSCERLGGGINGGGGGSPKTPFSMAPKPHFFNPFANPSAAC

SEQ ID NO: 4183 - protein, 222 aa, Pinus resinosa
MGRGKIEIKRIENTTNRQVTFCKRRNGLLKKAYELSVLCDAEVALIVFSSRGRLYEFANHSVKRTIERYKKTCVDNNHGGAISESNSQYWQQEAGKLRQQIEILQNANRHLMGDGLTALNIKELKQLEVRLEKGISRVRSKKNEMLLEEIDIMQRREHILIQENEILRSKIAECQNSHNTNMLSAPEYDALPAFDSRNFLHANLIDAAHHYAHQEQTTLQLG

SEQ ID NO: 4184 - protein, 185 aa, Pharus virescens
EMRRIENKINRQVTFAMRRNGLLKKAYELSVLCDAEVALIIFSNRGKLYEFCSGQSMTKTLERYQKCSYGGPETAIQNKENELVQSSRNEYLKLKARVENLQRTQRNLLGEDLGSLGIKELEQLEKQLDSSLRHIRSTRTQQMLDQLTDLQRREQMLCEANKCLRRKLEESNQVHGQQVWEHGAN

SEQ ID NO: 4185 - protein, 219 aa, Helianthus annuus
MKSFTGTTQKCTVCEKTVYLVDKLVANQRVYHKACFRCHHCNSTLKLSNFNSFDGVVYCRHHFDQLFKRTGSLEKSFDGTPKFKPERTFSQETQSANRLSSFFEGTRDKCNACAKIVYPIERVKVDGTAYHRACFKCCHGGCTISPSNYIAHEGRLYCKHHHIQLFKKKGNYSQLEVEETVAAPAESETQNTETQNAETQNADTQNADTQNTETQNGSV

SEQ ID NO: 4186 - protein, 296 aa, Saccharum officinarum
MSGGGQDLQLPPGFRFHPTDEELVMHYLCRRCASLPIAVPIIAEIDLYKFDPWQLPRMALYGEKEWYFFSPRDRKYPNGSRPNRAAGSGYWKATGADKPVGTPKPLAIKKALVFYAGKAPKGEKTNWIMHEYRLADVDRSARKKNSLRLDDWVLCRIYNKKGGLEKPAAASSGDHKPMVFAAGAVSSPPEQKPFVATPGGLPPAAFTADLAAYYDRPSDSMPRLHADSSCSEQVLSPEQLACDREVQSQPKISEWERTFASDPVNPAGSMLVDPVVGGHAGDPLLQDILMYWGKPF

SEQ ID NO: 4187 - protein, 261 aa, Physcomitrella patens
MVEKVVVSSLRRKRGGNLLAPLKRNVSSIAKKSSTPKSGKPVGSPKVYKGVRMRTWGKWVSEIREPNKRSRIWLGSFPTAEMAAKAYDAAAVCLRGRSVKLNFPDSPPRCAARCNSPREVQAAATAAAVACIPSATALTVANFQSPAQTLESSPLHSSPSSSDMSSGDEDSGEDSVQSFVAEGSQISPSEVVPVLEWVKVEFGDKETVAAGDVDFDCDYSFISEFAADSLLACSYNSKGRTEYLPIETHDAALYDSTLWFF

SEQ ID NO: 4188 - protein, 472 aa, Oryza sativa (japonica cultivar-group)
GFPEKLIEMPNDRELTCGICFENCPRTSMSAAACGHPFCSACWRGYISTSINDGPGCLMLRCPDPSCTAAVGQDMINSLADDEDREKYGRYLRRSYIEDNRKTKWCPAPGCEYAVEFVMGSGSYDVNCNCSYGFCWNCTEEAHRPVDCATVSKWILKNSAESENMNWILANSKPCPKCKRPIEKNQGCMHITCTPPCKFEFCWLCLGPWSEHGERTGGFYACNRYEAARQEGAYDESERRREMAKNSLERYTHYYERWAANQSSRQKALGDLLSLQNDKLEKLSDIQSQPESQLKFIIEAWLQIVECRRVLKWTYAYGFYLPEHEHAKRQFFEYLQGEAESGLERLHQCAEKELQVYLEAESPSKDFNDFRTKLAGLTSVTRNYFENLVRALETGLNDVGPSTSHGTCSKSATSKSLGSKSKSSKSRASSTSSKTGGSSRGVDESNIWTCDQCTYANPRSARNCQACNNQHR

SEQ ID NO: 4189 - protein, 517 aa, Zea mays
  misc_feature (146)..(146): Xaa can be any naturally occurring amino acid
MLGFCAPSACSPPDEATPEPFRSLQIATTVAAAAATTKKKRRPAGTPDPDAEVVSLSPRTLLESDRYVCEICGQGFQRDQNLQMHRRRHKVPWKLLKREAGEAARKRVFVCPEPSCLHHNPSHALGDLVGIKKHFRRKHSGQRQWXACARCSKAYAVHSDYKAHLKTCGTRGHSCDCGRVFSRVESFIEHQDTCNAGRTRAETSSSPASGGGYGGGTGAGFCVAAAASTSQQRHLHAAAAAAAALSRTASSASPSSGGEFGVSQQVACWPGPAMASPTAAATFHRFDQALSPPTPHERPGGIHNLELQLMPPRGSAASYYEGAAGAAPAAAVRCCASPHYSPAVHVPQPGADPMRLQLSIGFGGGDGETSAPAAAARLKEEAREQLRLAMAEKAAADDARAQARRQAELAEQELAAARRMRQQAQAELGRAHALRDHAVRQVDATLLQVTCYSCRCKFRARVTGGGAMSSEVASYVSSVVTAEGGDAEVDDDDPYRHHRQLTADDDAPSHARMMDIN

SEQ ID NO: 4190 - protein, 340 aa, Zea mays subsp. parviglumis
MGRAPCCEKVGLKRGRWTKEEDQILANYIAEHGEGSWRSLPKNAGLLRCGKSCRLRWINYLRADVKRGNISKEEEDVIIKLHATLGNRWSLIASHLPGRTDNEIKNYWNSHLSRQIHTYRRKYTAGPDTAPIAIAIDMSKLRSAETRRGGRTPGRSPKSASSSSMTKSKQPDPEPEPESGGASSPRHSDGARSAVVDPDPDPNQPNSSSSGSTGEGEDATGPWLLDPVELGDLWEAESEMDALMSIGGNAHDSATAEGFDAAQAQAQVDDLFDDMDWDNFAAHLWGEPEQQTDHSAQPQPQQAAEPQAAAAAAAAAEAVACDPDEHELEALETWLLSDSF

SEQ ID NO: 4191 - protein, 249 aa, Taihangia rupestris
MGRGRVELKRIENKINRQVTFAKRRNGLLKKAYELSVLCDAEVALIIFSNRGKLYEFCSSSSSMLKTLERYQKCNYSTPETHVSTREALELSSQQEYLRLKARYEALQRNQRNLLGEDLGPLNSKELESLERQLDMSLKQIRSTRTQCMLDQLTDLQRKEQMLNEANRSLKQRLFEGYNVNQLHQFQLNANAEDVGYGRHQQAHQPHSDVFYHPLELEPTLQIGYHQSDPIQVVAAGPSVSNFMGGWLP

SEQ ID NO: 4192 - protein, 221 aa, Amborella trichopoda
MGRGKIEIKRIENPTNRQVTYSKRRGGIIKKAKELTVLCDAEVSLIMFSSTGKFSEYCSPSTSTKKIYDRYQQVSETNLWDTHYEKMQRDLGNLKEESNRLRKLIRQKMGEDINELKYKELRDLEQNLEEWVKRIRDKKNHLVTNQTETCKKRIKNLEEQNKMMRHMMEEDEAERGLEDDGDYESQLALGVRNTHLFAYRMRPAEGNIHDRGYGLNDLRLG

SEQ ID NO: 4193 - protein, 267 aa, Oryza sativa (japonica cultivar-group)
MGRGKVQLKRIENKINRQVTFSKRRNGLLKKAHEISVLCDAEVAAIVFSPKGKLYEYATDSRMDKILERYERYSYAEKALISAESESEGNWCHEYRKLKAKIETIQKCHKHLMGEDLESLNLKELQQLEQQLESSLKHIISRKSHLMLESISELQKKERSLQEENKALQKELVERQKNVRGQQQVGQWDQTQVQAQAQAQPQAQTSSSSSSMLRDQQALLPPQNICYPPVMMGERNDAAAAAAVAAQGQVQLRIGGLPPWMLSHLNA

SEQ ID NO: 4194 - protein, 245 aa, Zea mays
MGRGKVQLKRIENKINRQVTFSKRRSGLLKKAHEISVLCDAEVALIIFSTKGKLYEYSTDSCMDKILERYERYSYAEKVLISAEYETQGNWCHEYRKLKAKVETIQKCQKHLMGEDLETLNLKELQQLEQQLESSLKHIRTRKSQLMVESISALQRKEKSLQEENKVLQKELAEKQKDQRQQVQRDQTQQQTSSSSTSFMLREAAPTTNVSIFPVAAGGRVVEGAAAQPQARVGLPPWMLSHLSC

SEQ ID NO: 4195 - protein, 427 aa, Zea mays
MGRHSCCYKQKLRKGLWSPEEDEKLMNHITKHGHGCWSTVPKLAGLQRCGKSCRLRWINYLRPDLKRGAFSEEEEDLIVELHAVLGNRWSQIATRLPGRTDNEIKNLWNSSIKKKLRQKGIDPNTHKPLLVEVERSKAAPTTSTERTSESNDVDPSSGAALGNSSHLLLSETAQSPQLPALGKHRRETTSLAHLRVPPKELFLDQLASGHENLTGCRTAGPVPNFPFQQLMCYNNEFGNKNGASNNSLWFNHNETSGSTISTVMPPVSPSTLSTSTGLNRSPDNPHSGGTAIQSTQFYWDAANPSSCSSRGSSGSNGLGFELQSTSSLLESSVFPWTELTPDKNSQVQLGEELKWPDLLHGTFTDTHATMQNLSQSLYEDVIKAESQFNIEGLCAAWSQNLQPQQHLQVSDLYDKDLQRMSLSFENI

SEQ ID NO: 4196 - protein, 777 aa, Arabidopsis thaliana
MFDFKIFTFSFAQSKYLENIREKTLTEVSTSDIELLRRNSQPFRRATPCSLTVDLQANSFTPKLQSYLMMMPGRNKRKERSWPEPQTQPQSEIPSSSSSLAADNMSPPSTIAYVLPPGFKFMPNDKEVINCYLKPYSDGNTNVLLNVPIHRVNIYESNPQTLSEEFQKGNDKEWFIITERNKVDQGRNVATLTEDIGTQKWLPKRFKAGDGVVGNKRPLAYYVGKPSEGVKTDWLMQEYSLDHSSHNTTRRLRAFKRWMQANGVDCSEALNLVDDENDGVSVRAFCDLKEGDVVANISKTACLTIKTSGAREMIESADLDGSLGLSVALMYERSLGEESPWAGYLQILPIQEDLPLVWSLEDLDSLLSGTELHKLVKEDHVLIYEDWKENILPLTSSLPQNVDSDSFGIKEYLAAKSLIASRSFEIDDYHGSGMVPLADLFNHKTGAEDVHFTHESDSEADESDNDDAANETTDEDEPSSKISSSPEQSFEEVPGENTDDEAKEEEEEEEEEEEGEEEEEGEEEEENSSMLQNDQSGLKMIMVKDVSAGAEVFNTYGLMGNAALLHRYGFTELDNPYDIVNIDLELVTEWSTSSFTSRYTRARLALWRKLGYTGCESQNSEYFEVSSTGEPQTELLILLYILLLPDDTYNKLDLAESTTGASPSKEGKRSSSYEITIGKHKFVYGESGNDILLTDGVCEALLTIVDKRESLYGSLSSLEDDIVRVKTCCLPRDRRLYHSLVLRVSERKILKKLRSYIHTQTNESSSGKRRKKMVPKS

SEQ ID NO: 4197 - protein, 235 aa, Arabidopsis thaliana
MEEGDFFNCCFSEISSGMTMNKKKMKKSNNQKRFSEEQIKSLELIFESETRLEPRKKVQVARELGLQPRQVAIWFQNKRARWKTKQLEKEYNTLRANYNNLASQFEIMKKEKQSLVSELQRLNEEMQRPKEEKHHECCGDQGLALSSSTESHNGKSEPEGRLDQGSVLCNDGDYNNNIKTEYFGFEEETDHELMNIVEKADDSCLTSSENWGGFNSDSLLDQSSSNYPNWWEFWS

SEQ ID NO: 4198 - protein, 278 aa, Glycine max
MGRKPCCDKMGLKKGSWTAEEDEILVNYINKNGGHGSWRSLPKLAGLLRCGKSCRLRWTNYLRPDIKRGSFTLEEEKLIIQLHGILGNRWAAIASQLPGRTDNEIKNLWNTHLKKRLICMGLDPQTHQPLASPHNLNDKAHASSSTSTRHMAQWESARLEAEARLSREPHLYYNNNKTDSDYFLRIWNSDLGESFRDVHKLESSIKCESQSATTTTTTTDLASSTPASIVKKEFLWGVKKIVSYSSSSSSELEHDSCDTSLQFLLDFPINNDMSFLEL

SEQ ID NO: 4199 - protein, 611 aa, Oryza sativa (japonica cultivar-group)
MARSSTESRTRTTVSVVVLFGLCSFFYLLGVWQRSGFGRGDSIAAVVNEQTKCVVLPNLNFETHHSASDLPNDTGSTEVKTFEPCDAQYTDYTPCEEQKRAMTFPRDNMIYRERHCPPEKDKLYCLVPAPKGYAAPFHWPKSRDYVHYANIPHKSLTVEKAIQNWVHYEGKVFRFPGGGTQFPQGADKYIDHLASVIPIANGKVRTALDTGCGVASLGAYLLKKNVLTMSFAPRDNHEAQVQFALERGVPAYIGVLGSMKLSFPSRVFDMAHCSRCLIPWSGNDGMYMMEVDRVLRPGGYWVLSGPPIGWKIHYKGWQRTKDDLQSEQRRIEQFAELLCWNKISEKDGIAIWRKRINDKSCPMKQENPKVDKCELAYDNDVWYKKMEVCVTPLPEVKTMTEVAGGQLEPFPQRLNAVPPRITHGFVPGFSVQSYQDDNKLWQKHINAYKKINNLLDTGRYRNIMDMNAGLGSFAAALESTKLWVMNVVPTIADTSTLGVIYERGLIGMYHDWCEGFSTYPRTYDLIHANAVFSLYENKCKFEDILLEMDRILRPEGAVIIRDKVDVLVKVEKIANAMRWQTRLTDHEGGPHVPEKILFAVKQYWVVESKSS

SEQ ID NO: 4200 - protein, 222 aa, Eupomatia bennettii
KRRMGLLKKAHEISVLCDAEVALIVFSTRGKLYEYSTDSCMSRILDRYERDSYAERELVVSGLESEGSWCLEYSKLKAKVEALQRNLRHFTGEDLETLSLKELQQLEHQLDAALKHIRSRKNQIMSESIAELQRKERLLQEQNQMLEKKVQEKEKAMAQQAQWDHQNQSQSSLSFLLATPLPTLNIGTYHQANGVGAEEEGARRSARTNSLMPPWMLRHVNE

SEQ ID NO: 4201 - protein, 236 aa, Magnolia grandiflora
QLKRIENKINRQVTFSKRRMGLLKKAHEISVLCDAEVAVIVFSTKGKLYEYSTDSRMSRILERYERYSYAERELVLSGPESEGSWCLEYGKLKAKVESLQRNLRHFTGEDLDTLSLKELQQLEHQLDAALKHIRSRKNQIMFDSIAELQRKEKSLREQNNMLEKEIQEKEKAMAQQAQWEQQNQSQSSPSFLLASPLPTLNIGTYHQGNEVEEEGARPPARTNSLMPPWMVRHVNE

SEQ ID NO: 4202 - protein, 605 aa, Oryza sativa (japonica cultivar-group)
MRGSRMNPGDRRTRSTMSIVIVMSLCCFFYILGAWQKSGTGRGDSIALRVTKETDCTILPNLHFETHHSLGGVNPLVMTDKVFEPCHIRYSDYTPCQDQNRAMNFPRENMNYRERHCPTETKKLRCLIPAPKGYVTPFPWPKSRDYVPYANAPYKNLTVEKAVQNWVQFEGDVFRFPGGGTMFPNGANAYIDELASVIPFTDGTIRTALDTGCGVASWGAYLMDRNVLTMSFAPRDSHEAQVQFALERGVPAVIGVLGTIKLPYPSGSFDMAHCSRCLISWKSNDAMYMFEVDRVLRPGGYWILSGPPINWKTNHQAWKRSKEDLEAEQNVIEKIAEMLCWGKIHEKGDTVIWRKKADSNECHNKDDHPSKMCKIQDADDVWYKKMEGCITPFPEEAQLRKFPERLFAAPPRILQGRTPGVTEEIFEEDNKLWKKYVSTYKRINKLIGSLRYRNIMDMNAGLGSFAAIIDSPISWVMNVVPTISEKNTLGIIYERGLIGIYHDWCEAFSTYPRTYDLIHANGLFSLYQNKCNMEDILLEMDRILRPEGAVILRDNVEVLNKVRRTVMGMRWKSKLLDHEDGPHIPEKILVSVKKYWVGNEEENSS

SEQ ID NO: 4203 - protein, 235 aa, Streptochaeta angustifolia
EMRRIENKISRQVTFAERRNGLPKKAYELSLLCDAEVALIIFSSGRLFEFSSASCMYRTLERYRTCNYRSHEAAAPIETESNYQEYLKLKTRVEFLQTTQRNLPGEDLGPLNMKELEQLENQIESSLKNIRSTKNQTLLDQLFDLRHKQQQLQDLNKDLRRKLQEVGGHDNALQVWEDGGPSGSAGHEHLQGLLQPSEIDPSLQIGYHQAYLDQLNNGQIAQYPNGHLPSSAPWI

SEQ ID NO: 4204 - protein, 93 aa, Zea mays
MASMSLSSSRAQWTAKQNKLFEQALAVYDRDTPDRWHNIARAVGGKSADEVRRYYELLVKDLEHIEAGKVAFPAYRCPGGYDDADSDRLKHLT

SEQ ID NO: 4205 - protein, 219 aa, Sorghum bicolor
EMRRIENKISRQVTFAKRRNGLLKKAYELSVLCDAEVALIIFSSRGRLFEFSTSSCTYKTLERYRSCNFASEASAPLEAELNNYQEYLKLKTKVEFLQTTQRNLLGEDLGPLNVKELEQLENQIEISLKHIRSSKNRQMLDQLFDLKRKEQQLQDANKDLRRKGPETSEENVLRLSCQDIGCSGSSGHPGEANQERLHLALDPSLHIGYQAYRDHMNNN

SEQ ID NO: 4206 - protein, 244 aa, Zea mays
RNGLLKKAYELSILCDAEIALIVFSTRGRLYEYSSNSVRSTIERYKKASASTSGTAPVTDVNSLQYFQQEAAKLRQQIQTLQNSNRHLMGESTGNMTAKELKGLESRLERGIGRIRSKKHELLLAEIEYMQKREADLHNENMFLRAKVAEAERALEQEAAEDQTMMVPAAVRGATTELKALPASFDASGYYQYQQHQHVVAAASAASSSQYAEQPQGQQEYHHQTALHLGYHVKIDSAADKGFL

SEQ ID NO: 4207 - protein, 492 aa, Musa acuminata
MDSEDDMHDANDLESVEDDFYSGDTGMGSDDGDAHYDFGDNESDDSDDITSRQQQNYTILSEADIRQHQEEDISRVSTVLSIPRYAACILLRHYNWSISRVHDEWFADEERVRKVVGLLEKPVEMPNARELTCGICFENYPRDCMNSASCGHPFCWACWRGYISTSISDGPGCLMLRCPDPSCSAAVGQNIVELLATDEDKEKYSRYLLRSYVEDNRKLEEVEEKEEEEKAIGEGGGRERGREEVIKWCPAPGCEFAVEFVIGSGNYDICCSCSYNFCWNCTEEAHRPVDCVTVAKWILKNSAESENMNWILANSKPCPKCKRPIEKNQGCMHITCTPPCKFEFCWLCLGSWSEHGERTGGFYACNRYEAAKQEGASRQKALADLHSMQNEKLEKLSDRQSQPESQLKFIIEAWLQIVECRRVLKWTYAYGYYLPEHEHSKRQFFEYLQGEAESGLERLHQCAEKELQVYLDAESPMKDFNDFRTKLAGLTR

SEQ ID NO: 4208 - protein, 222 aa, Chasmanthium latifolium
ELRRIENKISRQETFAKRRNGLLKKAYELSVLCDAEVAHIIFSSRGRLYEFSTSSCIYKTLERYRSCSYASEASAPMEAELSNYQGYLKLKTRVEFLLTTQRNLLGEDLGPLSAKELEQFENQVEISLKHIRSTKSRQLLDQLFELKRKEQQLQDANKDLRRKIQDTSGENMLRMTCKDIGSSGSSSGHARDAKHQELPHSGVCDPSLRIGYQAYMDQLNNE

SEQ ID NO: 4209 - protein, 683 aa, Ostreococcus tauri
  misc_feature (1)..(1): Xaa can be any naturally occurring amino acid
XPRFAKPTFAFDNGIELAYVDPRRFGKIKLVRDVKEVIGGLGVDPSKALPEGDAFAAMWKRRSAPIKTALMDQKIMAGIGNWMADGMFERTRTDDAIASLRSTEILYRARVHPETRANEMTDSQLEAIRERILEVVTVACAANSDHDLFPSDWLFHQRWGKTDGAKVNGDAIKFIEVGGRTTAYVPKLQLKTDRAITIKREIKREPEAEHTTDPPKPKRARAAAKRASSAKASPGAPAARGSSDKQCPVCRELCVKPAVLPCGHVACLWCTHCAMSHLGESHCALCRAPFNALPALSRALENHHLWCDVGAFAERLEQNRAEEVERGHKSPTFARCDAASVGRHAGEDAMTIVDFGQALDAMESDEAISSAMKEAVERGKDGARGTLGRCETFDPSLGRDVAAFHACACLNHSREPVGDIGAFCGEIASRPVVCQQCGTLYERAHADVLTARAGVGGEWCVACGATREPTRVILALKEDVEATYPKAFIEASRKRCDETLARSLVALEREIERKEAEERRLAEERGVEMNATATVACGDGTQRRRRPSRMTREWPRLQPCRRQSVSASPPTKSATSPSFKPAFGFTPVQEAKTEQKPAFGFSAPAEAKPNSSESKAAFSFAPAPSSAAATESKPVDSSKSTAPIMGFSAEFLAKASSGYQKAQAALEDELKGTNSEEKKPTEV

SEQ ID NO: 4210 - protein, 233 aa, Solanum tuberosum
MKIQCDVCEKAQATVICCADEAALCAKCDIEVHAANKLASKHQRLHLQCLSNKLPPCDICQDKAAFIFCVEDRALFCKDCDEAIHSASSLAKNHQRFLATGIRVALSSSCNKEAVKNQLEPQPPQQNSQQVGLKMPPQQLSGITSPSWPVDDLLGFPDYESSDKKDLLELGEFEWLGGIDLFGEQTAAEVPELSVPQSSNTNIYRTTKYQMPYKKPRIEIPDDDEYFTVPDLG

SEQ ID NO: 4211 - protein, 221 aa, Pennisetum glaucum
  misc_feature (12)..(12): Xaa can be any naturally occurring amino acid
  misc_feature (202)..(202): Xaa can be any naturally occurring amino acid
EMRRLENKISRXVTSAKRRNGLLKKAYEVAVLCDAEVALIIFSSRGRLFEFSTSSCMYETLEQYRSCNFTSEASSAPIEAELSNYEEYLKLKTRIEFLQTTQRNLLGEDLGPLSTKELEQLENQIEISLKHIRSSKNQQMLDQLFELKRKEQQLQDSNKDLRKKIQETSEENVLRPTFQDLGACGSSGHPRDANQEYLRQLXCDPTLRIGYQSYIDHLSNE

SEQ ID NO: 4212 - protein, 395 aa, Physcomitrella patens
MGALEILDYNNTLGKRDRDYEVKEAACMGIQNARQLLQSLTQVRSPVVDEECDVMAGAAISKFQKVVSLLSRTGHARFRRRTRNAAVAGYAGVFLESSNFFRENSQETSRDRIVSSGHASPSQFTPTSSSKPPQSPELQAIKYKVFPQSSRSADATPASSDPASGVHHPKPLQILHSSMMQQSIPEHILRPVASAAYRPTALPPNPFNKQEVGSKEGVSGHSPDSSLSSGPPQSTTTASFPTMSVQDARITSLQNMKTAEQPSALPPRPQPPTPKKKCSGQSDENGATCAILGRCHCSKRRKLRLKRTITVRAISSKLADIPSDEYSWRKYGQKPIKGSPHPRGYYKCSSIRGCPARKHVERSMEDSSMLIVTYEGDHNHPQSSSANGGLTVQSQ

SEQ ID NO: 4213 - protein, 203 aa, Solanum demissum
MDILGNLYIDPLPLVIPTTTSSTTFDNNSNEKVMLLLASKIPKRRGDRKKFHETRHPVYRGVRWKNFEKWVSEVRVPAKKSRIWLGTFPNAEMAAKAHDVAVMALKGRSACLNFADSTWRLPVPASAAVKDIQKAAAEAAEAFRVSESLERENSEEVVINNDDHYVVDSGWRLVIPASAVARDIQKAVAEAFCPSESSKGEYF

SEQ ID NO: 4214 - protein, 319 aa, Zea mays
PTRPSFSFSLSPSWTILSISFLSLHILRRAEAARDTIGKLLQQEIKLSPTQDQKKLCMEQEEVGLALGLSLGSGHHHQELKPQHPSHPCAALLEPSLSLSGPATKDDGPTAPVRRFAAVKRELQTMEGNDDEATGRVLVYSVASSAVVTADDDEGCNSSRKKLRLSKEQSALLEDHFKEHSTLNPKQKAALARQLNLSPRQVEVWFQNRRARTKLKQTEVDCEILKRCCETLTEENRRLHRELQQLRALSHPHPHPAAFFMPTAAAAALSICPSCQRLVATGASAAAATTAGADNKPKAGGPGGRAPHVFSPFTNSAAC

SEQ ID NO: 4215 - protein, 277 aa, Oryza sativa (japonica cultivar-group)
MEPGCGEGGGGGGGRDERVPQWGAQETRELIAARGEMERESAAAAAARRSAKTLWEAVSARLRERGYRRTAEQCKCKWKNLVNRYKGKETSDPENGRQCPFFDELHAVFTERARTMQQQLLESESGPSVKKKLKRPSGDLSSEDSDDEEDGSGDSGDEKPIRSRKRKIADKRQQSQRMAEKSRTSISSIHELLQDFLVQQQRMDIQWHEMMERRSQERIVFEQEWRQSMQKLEQERLMLEHTWMEREEQRRMREEARAEKRDALLTTLLNKVLQEDL

SEQ ID NO: 4216 - protein, 107 aa, Eranthis hyemalis
TTNRQVTYSKRRTGIVKKARELTILCDAEVSLIMFSSTGKLSEYISPSTTTKKIYDAYQQVTGVDLWISSYEKMQETLKKQKESNMKLRKEIRQRIGEGLDNLSFEE

SEQ ID NO: 4217 - protein, 607 aa, Arabidopsis thaliana
MGVDELSHLKFSLLLESSACNDLSGFKSLVEEEGLESIDGSGLWYGRRLGSKKMGFEERTPLMIAALFGSKEVVDYIISTGLVDVNRSCGSDGATALHCAVSGLSANSLEIVTLLLKGSANPDSCDAYGNKPGDVIFPCLSPVFSARMKVLERLLKGNDDLNEVNGQEESEPEVEVEVEVSPPRGSERKEYPVDPTLPDIKNGVYGTDEFRMYAFKIKPCSRAYSHDWTECPFVHPGENARRRDPRKYHYSCVPCPEFRKGSCSRGDTCEYAHGIFECWLHPAQYRTRLCKDETNCSRRVCFFAHKPEELRPLYPSTGSGVPSPRSSFSSCNSSTAFDMGPISPLPIGATTTPPLSPNGVSSPIGGGKTWMNWPNITPPALQLPGSRLKSALNAREIDFSEEMQSLTSPTTWNNTPMSSPFSGKGMNRLAGGAMSPVNSLSDMFGTEDNTSGLQIRRSVINPQLHSNSLSSSPVGANSLFSMDSSAVLASRAAEFAKQRSQSFIERNNGLNHHPAISSMTTTCLNDWGSLDGKLDWSVQGDELQKLRKSTSFRLRAGGMESRLPNEGTGLEEPDVSWVEPLVKEPQETRLAPVWMEQSYMETEQTVA

SEQ ID NO: 4218 - protein, 200 aa, Arabidopsis thaliana
MAAFPQWTRVDDKRFELALLQIPEGSPNFIENIAYYLQKPVKEVEYYYCALVHDIERIESGKYVLPKYPEDDYVKLTEAGESKGNGKKTGIPWSEEEQRLFLEGLNKFGKGDWKNISRYCVKSRTSTQVASHAQKYFARQKQESTNTKRPSIHDMTLGVAVNVPGSNLESTGQQPHFGDQIPSNQYYPSQENFRGFDQRW

SEQ ID NO: 4219 - protein, 315 aa, Brassica oleracea
MTRRCSHCNQNGHNSRTCPNRGVKLFGVRLTEGSIRKSASMGNLSHHSGSGLSGLVSNNPGSPGNGPDHDGYASEDFVPGSSSSHRERKKGNPWREEEHRMFLLGLQKLGKGDWRGISRNYVKTRTPTQVASHAQKYFIRQSNVSRRKRRSSLFDIIPDEATDSVPAAPLILETEECESMKSTNSVGVEAPEDSIQTQLQPPPPGSFPVLYPAYFSPFYSFPFPVWPAAYDTEPAKEETHQILRPTAVHSKAAPIKVDQLLGMSKLSLKESSQNGVSEESLSLKLVGGSSSRQSAFHPNPASDGGSDMNTVIHAV

SEQ ID NO: 4220 - protein, 277 aa, Brassica oleracea
MGKEDLSLSLSLGFAQTHHPLKLNLNPTSSSISNLQMFPWNQTFVSSSDHQNQQFFTKIDVNSLPSTVHLEEETGFSSPNSTISSTVSGKRRSEREGTSGGAGDDLDVTLDRSSSRGTSDEEEEHGGEACRKKLRLSKDQSAVLEDTFKEHNTLNPKQKLALAKKLGLTARQVEVWFQNRRARTKLKQTEVDCEYLKRCVEKLTEENRRLEKEAVELRALKLSPRLYGHMSPPTTLLMCPSCERVAGPSNHNQRSVSLSPWLQMAHGSTFDVVHPRS

SEQ ID NO: 4221 - protein, 126 aa, Actinidia deliciosa
  misc_feature (24)..(24): Xaa can be any naturally occurring amino acid
IENKINRQVTFSKRRSGLLKKANXISVLCDAEVALIVFSHRGKLFEYSTDACMEKILERYERYSYAERELVNDPETPFLNVQKNWSLECTRLGEKIELLQRNIGHYMGQHLDSLSLKDLQHFEQQL

SEQ ID NO: 4222 - protein, 750 aa, Oryza sativa (indica cultivar-group)
MASSSNPSNLPCSSDGVCMVCKVLTAEVEQLRCSTCATPWHTPCLSSTPPLTDVAHWVCPDCSGDVTASYLPSDVARPESSLIAAIRVIEADPVLSIQEKARRRQELLGHAGDAGAARTEAVGENVEDSESNNPLSMLNKNINCSFCMLLPERPVTTPCGHNFCLKCFRRWIENGKRACVNCRAPITQKVAQDLIINLALVQAIRMANAANNASTTGETTVYHYKENEDKPDRAFTTERAKRAGMANASSGQIFVTIAPDYFGPILEDHDPRRNRGVRVGDHWKDRMECRQWGAHFPHIAGIAGQSTHGAQSVALSGGYLDDEDHGEWFLYTGSGGRDLSGNKRTSKEQSFDQKFEKLNAALRVSCLNGYPVRVVRSFKEKRSPYAPESGVRYDGIYRIEKCWRKTGVQGTFKVCSDEHGDHPRPLPDIEELKNAIDITERKGNPAWDFDATDGWKWMITPPISTKAVVTGDPRGKKMQGAARHTNNLSMRERLLKEFRCSICRNVMEEPVTTPCAHNFCKKCLLGSYDNLSLTEERSRGGRILRARKIVKKCPSCPSDIADFIQNPQVNRDIMNVIESLQNEAEKEDHARVSGEGSSAALVDSDDENDTAWENQDDGNLDEGGCNNPEDMITESVDLDSVTNVDNTENKVEVQQPHKRTAGAGKGKGGKRARTSSPGDADARNIVTSTETLDGIAADENVADLVQTEDCTFTGVERADPNALEVDGKNMIPDFSEAEKVNPKQDQEVLP

SEQ ID NO: 4223 - protein, 260 aa, Triticum aestivum
MAPSSPAAAAVASEGDEQQQQQIVAAAAAAKKGGGKRGRREMRRIEDATSRQVTFSKRRSGLLKKAFELGVLCDAEVALIVFSPRGRLYEYASAPDLQKTIDRYLNHTKGTSANEKTVEQPAAGVQMCRSEATALKHKIDAIEAYQRKLSGEGLGSCSAHELQELELQLEKSLSCIRQKKQQKMLDKILELKEKERKLLTENVVLREEYKALPLLELATAAAAERSPDGAGAEEAEEDERRLHYMEVETELVIGRPGSSS

SEQ ID NO: 4224 - protein, 620 aa, Oryza sativa (indica cultivar-group)
MASSSNPSNLPCSSDGVCMLCKVLTTEVEQLRCSTCATPWHTPCLSSIPPLTDVAHWVCPDCSGDVTASYPPSDVVRPESSLIAAIRVIEADPVLSIQEKARRRQELLGHAGDAGAAITEAVGENVEDSESNNPLSMLNKNINCSFCMLLPERPVTTPCGHNFCLKCFRRWIENGKRACVICRAPITQKVAQDLRINLALVQAIRMAKAANNASTTGETTVYHYKENEDKPDRAFTTERAKRAGMANASSGQIFVTIAPDYFGPILEDHDPRRNRGVRVGDHWKDRMEGRQWGAHFPHIAGIAGQSTHGAQSVALSGGYLDDEDHGEWFLYTGSGGRDLSGNKRTSKEQSFDQKFEKLNAALRVSCLNGYPVRVVRSFKEKRSPYAPESGVRYDGIYRIEKCWRKTGVQGTFKVCSDEHGDHPRPLPDIEELKNAIDITERKGNPAWDFDATDGWKWMITPPISRKAVVTGDPRGKKMQGAARHTNNLSMRERLLKEFRCSICRNVMEEPVTTPCAHNFCKKCLLGSYDNLSLTEERSRGGRTLRARKIVKKCPSCPSDIADFVQNPQFLSRYNAVVDLPPGLGRQLSRLYERKLSNWTDFSTKFGCYFIRISIELDCFD

SEQ ID NO: 4225 - protein, 222 aa, Eupomatia bennettii
RNGLLKKAYELSVLCDAEVALIIFSNRGKLYEFCSSSSSMFKTLERYQKCNYGAPETVVTTREIQSSHQEYLKLKARVEALQRSQRNLLGEDLGPLSGKELDTLERQLDMSLKQIRSTRTQYMLDQLTDLQRREQMLSEANKTLKRRLEEGMEANPNHAWDHNPHAMGFVRQQGPPQDDGFFHPLDCEPTLQIGLCRYQTDQMQMTTAPGPSANNYMPGWLA

SEQ ID NO: 4226 - protein, 632 aa, Zea mays
MKREYQDPGGSGGDVGSSKDKMMAAAAGAGKQEEEDVDDLLAALGYKVRSSDMADVAQKLEHLEMAMGRGGVGGAGATADDGFVSHLPTDTVHYNPSDLSSWVESMLSELNAPPAPLPPATPAPRLASTSSTVTSGAAAGAGYFDLPPAVDSSSSTYALKPIPSPVAAPSADPSTDSAREPKRMRTGGGSTSSSSSSSSSMDGGRTRSSVVEAAPPATQASAAANGPAVPVVVVDTQEAGIRLVHALLACAEAVQQENFSAAEALVKQIPMLASSQGGAMRKVAAYFGEALARRVYRFRPPPDSSLLDAAFADLLHAHFYESCPYLKFAHFTLNQAILEAFAGCRRVHVVDFGIKLVMQWPALLQALALRPGGPPSFRLTGVGPPQPDETDALQQVGWKLAQFAHTIRVDFQYRGLVAATLADLEPFMLRPEGGGDTDDEPEVIAVNSVCELHRLLAQPGTLDKVLGTVRAVRPRIVTVVEQEANHNSGTFLDRFTESLHYYSTMFDSLEGAGSGSGSGSGSGQPTDASPPAGTDQVMSEVYLGRQICNIVACEGAERTERHETLVQWRGRLGGSGFEPVHLGSNAYKQASTLLALFAGGDGYRVEEKDGCLTLGWHTRPLIATSAWRVAAP

SEQ ID NO: 4227 - protein, 228 aa, Magnolia grandiflora
KRRNGLLKKAYELSVLCDAEVALIIFSTRGKLYEFCSSPSMLQTLERYQKCSYSTLEVSAPTNETQSSYQEYLKLKARVEILQRTQRNLLGEDLGPLSTKELEQLENQLEMSLKQIRSTKTQFMLDQLSDLKRKEQMLVEANKALKRKLEESGRENLLQLSWDTGAQNMSSYNRQPSNYEGFFQPLDCQPTLQMGYHPVYEDQMTVATNHGQNNVHGFMPGWMTIDLT

SEQ ID NO: 4228 - protein, 249 aa, Sorghum bicolor
MEYGVADDYGYGYGGYDDQQDLPSSSSVDGDEYATVLSAPPKRPAGRTKFRETRHPVYRGVRRRGPAGRWVCEVREPNKKSRIWLGTFATAEAAARAHDVAALALRGRAACLNFADSARLLRVDPATLATPDDIRRAAIQLAEDSSSSTPDASAAAAAVAVASSASVGQATPSSSAYQAGDDATGAAMYGAEYAAAAMYGAGMDFDHSYYYDGMVGGNEWQSAGSSGWHSNVDAGDDEGAGDMSLWSYY

SEQ ID NO: 4229 - protein, 206 aa, Magnolia grandiflora
KRRNGLLKKAYELSVLCDAEVALIIFSNRGKLYEFCSGSSMLKTLERYQKCNYGAPELPVSTRETQSYHQEYLKLKARVEALQRSQRNLLGEDLGPLSGKELETLERQLDISLRQIRSTRTQCMLDQLGDLQRREHMLSEANKTLRRRLEEGAQANHNQVWEPNAHAVDSYNRQQPQQQGDGFFHPLECEPTLHIGYQPDQITIAA

SEQ ID NO: 4230 - protein, 183 aa, Brassica napus
SFCPGFGYWAGSEFGPICSQDISGGGETSRKKLRLSKDQSAFLEDTFKEHNTLNPKQKVALAKKLNMTARQVEVWFQNRRARTKLKQTEVDCEYLKRCVEKLTEENRRLQKEAMELRTLKLSPQFYGQMTPPTTLIMCPSCERVAGPSSNHHQTHRPVAINPWVARAGQVAHGLDFEALRPRS

SEQ ID NO: 4231 - protein, 247 aa, Oryza sativa (japonica cultivar-group)
MEQEQVMSQESNSCTCSSSSNDASSAACSSLNASSPSSVDSGSAGGGGGGKKRPRSDHLKHPTYRGVRMRSWGKWVSEIREPRKKSRIWLGTFDTAEMAARAHDVAALAIKGRTVHLNFPDLAHLLPRAASASPKDVQAAAALAAATASPAPALSPTPCHDVDAAADDEPEPAEPEQATAPVCIVENGTLQQDGGTGLDYTYFTMPDALLEFGFTLPPPPPPYYCGSPWDDDADDFFFGEPLVLWEH

SEQ ID NO: 4232 - protein, 213 aa, Triticum aestivum
MAPRTSDKTATPPAAGAAATGLALGVGGGGNGGGVGTHYRGVRKRPWGRYAAEIRDPAKKSRVWLGTYDTAEEAARAYDAAAREYRGNKAKTNFPFASASAPPAAAAALTGDGSRSSNSSTVESFGGDVQAPMQAMPLPPSLELDLFHRAATSTAGAGAGAGMRFPFSGYPVSHPYYFFGQAAAALEYPSRGPSLPRTQLFLYKVGPYSEFVL

SEQ ID NO: 4233 - protein, 289 aa, Oryza sativa
  misc_feature (229)..(229): Xaa can be any naturally occurring amino acid
MRHTRRGRGDNSKWTLKRQRRRGHQQTVELPDEIVREVLIWLPVKSLARFKSVCKAWLSIISESCFIREHLQCSKLKRYWNPSSFLITPHIPLKPGDSIFAAFSTDIRFYQWSLQEDTRAAATLLYRRHFPAGEFEPVLPMAHCDGLVLLPTKTKAYVFNPATRDVLALPESNRNMRQRDICPPIGLGFDASTGKYKVARSFYRSREYNPMGIAAMGFEVFTLMEKKAXWRETLVDPPYPVLYSKIVTHCKGCLFYYIDRKNQQNPPQALLRFSLQDETFGVTSLLTDT

SEQ ID NO: 4234 - protein, 303 aa, Arabidopsis thaliana
MNWLPEAEAEDDFKGLLSGDFFDDLINHLDVPLDDIDTTNGEGDWVDRFQDLEPPPMDMFPTLPSDLTSCGSGMAKAPRVDIQRNIPALKQSYSSEALSSTLHQSSAPPEIKVSKLFQSLSPVSVLENSYGSLSTHNNGSQRLAFPVKGMRSKRKRPTTLRLSYLFPSEPRKPEKSTPGKPESECYFSSEQHAKKKRKIHLTTRTVSSTLEASNSDGIVRKCTHCETTKTPQWREGPSGPKTLCNACGVRFRSGRLVPEYRPASSPTFIPAVHSNSHRKIIEMRRKDDEQFDSSMIRAVISRG

SEQ ID NO: 4235 - protein, 744 aa, Zea mays
MPDLPCDGDGVCMVCRVTSPPEVDLLHCSTCATPWHSPCLSKAPALADAASWSCPDCSLDSATVAAPSAPANTLVAAIRAIESDNTLSDQEKARRRQALLAGDAPDVADDDDAADDTLEIVGKNFSCVFCMKLPERPVTTPCGHNFCLKCFQKWIQSKKRTCGKCRAPIPAKMAEQPRINSALVEVIRMAKISKNHNSAGSAVPYHYMRNDDRPDKAFTTDRAKKAGKANASSGQIFVTIAPDHFGPILAENDPRRNMGVRVGETWEDRLECRQWGAHFPHVAGIAGQSTHGAQSVALSGGYEDDEDHGEWFLYTGSGGRDLSGNKRTNKEQSSDQKFEKLNAALRISCLKGYPVRVVRSHKEKRSSYAPESGVRYDGVYRIEKCWRKIGIQGKFKVCSDDHGDRPRPLPKIKELQGATDITERKGRPSWDYDEKDGWKWMVPPPVSKRPVLSGDPETDKLIRKATKRAHLSVAERLLKEFGCSICRAVIKEPLTTPCAHNFCKTCLLGAYDSQSSMRERSRGGRTLRAQKIVKTCPSCPTDICDFLENPQINREMMELIESLQRKAVEEGKMAAGDAEESGDGDSEENGGALVKGEDDSNLNEEGQDGVDADGSVKIVVEMEGAKDDKKSKMGAAEVVDVLVEDAAAKQPKKRTADEDAAAKQTKHKADAETGGKRVKSSAAVEEVDVCVTPMKRTRKSGDMHDDGNGSPAVSSGRRVTRSSVNATGADDSPARRTRSRGRAC

SEQ ID NO: 4236 - protein, 234 aa, Hordeum vulgare subsp. vulgare
MGRGRIEIKRIENTTNRQVTFCKRRNGLLKKAYELSVLCDAEVALVVFSSRGRLYEYSNNSVKATIERYKKANSDTSNSGTVAEVNAQYYQQESSKLRQQISSLQNSNSRSLVRDSVSTMTLRDLKQLEGRLEKGIAKIRARKNELMYAEVEYMQKREMELHNDNIYLRSKVSENERGQQPMNMMASGSTSSEYDHMVAPYDSRNFLQVNMQQQQHYSQQLQPTALQLGQQYFN

SEQ ID NO: 4237 - protein, 232 aa, Hordeum vulgare subsp. vulgare
MGRGRIEIKRIENTTNRQLTFCKRRNGLLKKAYELSVLCDAEVALVVFSSRGRLYEYSNNSVKATIERYKKATSDTSSAGTVAEINAQHYQQESAKLRQQITTLQNSNRTLIGDTMATMSHRDLKQLEGRLDKGLGKIRARKNELLSAEIEYMQRREMELQNNNFYLREKVAETERGQQQTLNMMGAASTSNEYDQNMIQCDPRTFLQFNIMQQPQYYTQQEDRKTLNSVER

SEQ ID NO: 4238 - protein, 308 aa, Ceratopteris richardii
  misc_feature (1)..(1): Xaa can be any naturally occurring amino acid
  misc_feature (85)..(85): Xaa can be any naturally occurring amino acid
XQITDNRKHILLGVQTLRAMATAAFRTSSSPNVELSIFGCISNSISSSGNGMDNRTANRSEPSENLNLLLSSSGPKPLIESTLKXPPKQLNLLPVRSPCQKPAEGYSRWNAISDAHVNSKGIDMNQIPCSSESEDEDEAEAPSLKLRFLAGEGKRSEMAALGSGMADPGERERGLLEVSSRNSDEEESGSARKKLRLSKEQSALLEESFKEHSTLNPKQKSLLAKQLNLRPRQVEVWFQNRRARTKLKQTEVDCELLKRCCESLTEENRRLQKEVAELRALKGGSPLCYIPRLLHAFACSHINNVPLL

SEQ ID NO: 4239 - protein, 212 aa, Ceratopteris richardii
YGKPVDSFWSFTGGQSTVKREREKVGSETENTHNSASYPLCEVGSRGSDEEEGNSTRKKLRLSKEQSALLEESFKEYNTLNSKQKSALAKQLNLRPRQVEVWFQNRRARTKLKQTEVDCELLKRCCESLTEENRRLQKEVQELRALKVTAPRVIAHDYYTPIPAATLAMCPSCERLATIEPPPRPSSKQHVSAIPFASLAFNQHHPEPSAAC

SEQ ID NO: 4240 - protein, 242 aa, Ceratopteris richardii
  misc_feature (8)..(8): Xaa can be any naturally occurring amino acid
  misc_feature (11)..(11): Xaa can be any naturally occurring amino acid
  misc_feature (19)..(19): Xaa can be any naturally occurring amino acid
MLNYSFDXVKXISSSDLIXPAGNYYQHVTFNEQGDLADDDGICYDIINSTGEKKRGLTVDQVKYLEMNFTMDFKLEPERKALIAKELGLRPRQVAIWFQNRRARWKNKQLEQDYETLKSSYEALLQENEDMVKRNKALDEENKLLQAEIARLTGISGNVDVPVDIDAKVASPDLDSDSDLESTVKGEKQQNLKSEIGIPAKLDAQSEILESLTLSCLKSQEAIVAFVEQPIGANDSVVACAL

SEQ ID NO: 4241 - protein, 256 aa, Ceratopteris richardii
MPFIPATMKHHAALDSTDIKGKSKNSCKDLKSRALKRSRQDVVVDSDTEEKRRGLTMEQINILEMKFKEDVELEPERKTLIAKQLGLRPRQVAIWFQNRRARWKNKQVECKYELLKAQYDAVVKEKESITMEHESILEGNRRLHSESIEKANTLGGAISPALPSCNIMSPTDSADCQSEIIMSVDVIEGAISCCHPIQEPSSRMAADVVVETEYSFYSSLDNSFSQFPMLVRQLIANGHCLQDAYDIYLGCEYFYG

SEQ ID NO: 4242 - protein, 192 aa, Ceratopteris richardii
MAWSVSVGSTSIPQDEDETKQSVITSGISKTKGHNQGHRKHPSKDVTKDIGDGDELMCGVEKKRRLTAEQVNFLETSFSMDLKLEPERKAHLAKQLGIQPRQVAIWFQNRRARWKNQQIEQDYESLKASYEAVVEEKERLLKEHDLALEANKRLQAEIARLTRSLQSYDRNGMSEPKGGTAEQWQIRGNVNQ

SEQ ID NO: 4243 - protein, 196 aa, Brassica napus
  misc_feature (104)..(104): Xaa can be any naturally occurring amino acid
  misc_feature (155)..(155): Xaa can be any naturally occurring amino acid
  misc_feature (158)..(158): Xaa can be any naturally occurring amino acid
  misc_feature (174)..(174): Xaa can be any naturally occurring amino acid
  misc_feature (185)..(185): Xaa can be any naturally occurring amino acid
  misc_feature (189)..(189): Xaa can be any naturally occurring amino acid
  misc_feature (192)..(192): Xaa can be any naturally occurring amino acid
  misc_feature (195)..(195): Xaa can be any naturally occurring amino acid
MARLLFRLLGESNSPSPVPDPSTAAVTSDLVVTLAALLCAMVCVLGLIAVSRCVWLRRLAAGNRTHAGSQGGSVQSPPPPVAAANKGLKKKVLQSLPKLTFSPXSPSSEKFTECAICLTEFSNGDELRVLPQCGHGFHVSCIDTWLGSHSSCPSXRQXLVVARCHKCGGLPGSXSSEPEIEIRIXQGAXVPXSYXP

SEQ ID NO: 4244 - protein, 235 aa, Sorghum bicolor
MCPIKKEMTGESSSPCSSASTSSEHHQTVWTSRPKRPAGRTKFRETRHPVFRGVRRRGNAGRWVCEVRVPGRRGCRLWLGTFDTADAAARAHDAAMLAIAGAGACLNFADSAWLLAVPASYASLAEVRHAVAEAVEEFLLREVVQEDDALSATSSTPPSSPSSSDDGSTSDGGESSESDSSPAATGASPFELDVFNDMSWDLYYASLAQGMLVEPPSAVTAFMDEGFADVPLWSY

SEQ ID NO: 4245 - protein, 216 aa, Gossypium hirsutum
MDFVVQDYDMVDFGSVSESGTDRPVNFSDDYMMLASSYPKRRAGRKKFRETRHPVYRGVRRRNPGKWVSEVREPNKKSRIWLGTFPKADMAARAHDVAAIALRGKSACLNFADSAWKLPVPASSDPKDIQKTVAEVAETFRTAEHSSGNSRNDAKRSENTEMQKGFYLDEEALFGTQRFWANMAAGMMMSPPRSGHDGGWEEHEVDDYVPLWSYSI

SEQ ID NO: 4246 - protein, 119 aa, Triticum aestivum
MGGKCPHRNVKKRRYSHKTARRTKFELKGDDMVYAQLNKPDEERAPLPLDEDLPGMGQYYCLHCDRYFSNVAVRDEHFKTKRHKKRIKQMMGPAPHTQLDADVAAGMGMPDNGPKLMSM

SEQ ID NO: 4247 - protein, 206 aa, Arabidopsis thaliana
MTPLPMKEDVRAPPPLPSLIPESVLIQDVVAAAEPSVEYHCNSCSVDCSRKRYHCRTQADFDLCCDCYNEGKFDPGMAKTDFILMDSAGVSGASGTSWTDEETLLLLEGLEIFGGKWAEIAEHVATKTKAQCMLHFLQMQIEDRFHDGKDINQNIPVSTEQATTEKAIAETSEKMEVEDKVEGRGTADEKASEKTEGNSEETKTEN

SEQ ID NO: 4248 - protein, 186 aa, Lupinus multiflorus
SGPYPYFPSSSSSYHPFAFFNPENASSNNTFSHDLLSFPYNTPTTHHYHAPIPETLSNFADCAASTAMFKNDVSGSNFGFSNFLAKKPASKKDRHSKIHTSQGLRDRRVRLSIEIARKFFDLQDMLGFDKASNTLEWLFNKSKKAMKELARSKNSSSGVVANSFSSSDSECEVVSMINQDSIDATP

SEQ ID NO: 4249 - protein, 275 aa, Triticum monococcum
MEADASHAPTTSSSSVSSSTLSTSSSSSSLATSALELPKSPKPKHPKKRKRAASDREQDAAANTNGVRGDESSCCSTDEDNAAASVKAAVPKSGFKHPSYRGVRRRSWGKWVSEIREPRKKSRIWLGTFPTAEMAARAHDVAALAIKGRSAHLNFPELAHELPRPDSTSPADIQAAAAKAAATAAVQCEAEPEHEPETPSSSSGAASETPEPAPCAEAAPADSGEVDNALFDLPDLLLDLRDGLFWSPVWPAALAAEEYDGGCCVGLSEPLLWAE

SEQ ID NO: 4250 - protein, 227 aa, Zea mays
MGRGKIEIKRIENATNRQVTYSKRRTGIMKKARELTVLCDAQVAIIMFSSTGKYHEFCSPGTDIKTIFDRYQQAIGTSLWIEQYENMQRTLSHLKDINRGLRTEIRQRMGEDLDSLDFDELRGLEQNVDAALKEVRHRKYHVISTQTDTYKKKVKHSHEAYKNLQQELGMREDPAFGYVDNTGAGVAWDGAAAALGGAPPDMYAFRVVPSQPNLHGMAYGFHDLRLG

SEQ ID NO: 4251 - protein, 156 aa, Oryza sativa (indica cultivar-group)
MVVILASLLCALICVAGLVLVARCACRRRGAATTTTTTTTTPAATSPAPKGLKKKAIDALPTVSFALKQQQQAECAICLAEFAGGEELRLLPHCGHAFHVSCIDTWLGTHATCPSCRATVGTSTLFLPLPGRCRRCGEVDLPTLHDFSTAHHNTPP

SEQ ID NO: 4252 - protein, 359 aa, Triticum aestivum
MKIQCNACGAAEARVLCCADEAALCAACDEEVHAANRLAGKHQRVPLLPDAAAPPKCDICQEASGYFFCLEDRALLCRDCDVAIHTVNSFVSAHQRFLLTGVQVGLDPADPVPPVADKHVNTSGGSVDSLPKHLPKKNPTALFSGENSASIPSQNAISGDYSRQISVPNTKTGMTNWTMDNSALRLAEPPPKYLSDGNSKLLLSNQTTTALSNQMNRDSGRAYNLPFSGGNGSDSLPDWPVDEFFSNLEYGPNFGFTEHGSSKGDNAKLGSAGGSPQCRLAEGLFAEDLLGQVPGLDAEDPWVVPEVPSPPTASGLCWQGNLHYPVYDGAMFVPEAPSLQSSQDHFTASAGFKRRRREF

SEQ ID NO: 4253 - protein, 231 aa, Populus tomentosa
MVMAGSNSLSADKQESSLSSLLSDSSGSQQDSPSSNEKVLLAASRPKKRAGRRIFKETRHPIFRGVRKRNGDKWVCELREPNKKSRIWLGTYPTPEMAARAHDVAALAFRGKSACLNFADSAWRLPAPISNEAKDIRRAASEAAELFRTSDLGGQVMEDHTTENRGEVCSSTNDDIRDLPSENVSYIDEEAEFNLPGLLANMAEGLLLSPPHYTGDWNDGEIDADWSLWSS

SEQ ID NO: 4254 - protein, 274 aa, Ceratopteris richardii
MAWSPVKEEHLPQLVSTESTIEKTLKAKDPCKRPKRRAKKRTGKGSTIDDSIDKRRGLTVEQINFLEMSFKEDNKLEPERKACIAKQLGVRPRQVAIWFQNRRVRWKNKQVEQDYETLKARYQDVVKEKDSIMMQYESTMEGNRKLQAEVARLTNLLQSTEGISAHTDMDQVLSNCNSENLNCISENISPAKSADYPSEIIVSGDPTEGDISRFIFQEPISSMPYDLLPDGDYFILSPENSTGSFPSLVQQLVSNGHCVEDAYNIYLGYEYLCC

SEQ ID NO: 4255 - protein, 273 aa, Oryza sativa (japonica cultivar-group)
MAGFGLDQHLDLIRAHLLEDAHHHVLAPSPSPSPPGTGRVRPAPVSLPPRPPLLWAAASAAPRQQEECFELGGGYAGEGEGEEEDDFRRYRGVRQRPWGKYAAEIRDPARKGARVWLGTYDTAVEAARAYDRAAFQLRGSKAILNFPNEVAADAAVKWAPPVAPIPAAAMSAGRGKRVRSEEQYYLREVKKERLIMAPPENSSSSSSSAAAAAGDIWDELKGICSLPPLSPLSPHPHMAFPQLFVIDLAFGQILNSFVLLLLRTRDFAFDYAI

SEQ ID NO: 4256 - protein, 254 aa, Hyacinthus orientalis
MGEEADRSGYDRLASDGDGDGSGGDGDDGRVLEWEIGLPSADDLTPLSQPLVPPELASAFSITPDPARTILDVHRASHSTMSSLRRHNLASSSSAMKSFSPFPSGDPTVLESDDQKDESRVRRSEAENSEDDQSARSLKRPRLVWTPQLHTRLLTWVAHLGIKTAVPKTIMQLRMSRGLTRENVASHLQKYRLYFEEDAGRCRTNGHRPAIRCSHRRRCLIVCTKICCQLLLRRWPMPYAVPTMIPRARVWECR

SEQ ID NO: 4257 - protein, 231 aa, Populus tomentosa
MVLAGSNSFSADKQESSLSSLLSDSSGSQQDSPCSNEKVLLAASRPKKRAGRRIFKETRHPIFRGVRKRNGDRWVCELREPNKKSRIWLGTYPTPEMAARAHDVAALAFRGKSACLNFADSAWRLPAPISNEAKDIRRAAGEAAELFRTSDLGGQVMEDHTTEDRGEVCSSTNDDIRDLPSENVSYIDEEAESNMPWLLANMAEGLLLSPPHYTGDWNDGEIDADWSLWSS

SEQ ID NO: 4258 - protein, 227 aa, Ceratopteris richardii
RRSPPKEELDDDDLGDELSNPTEKNRRLTAEQVNFLEMSFNIDLKLEPERKALLAKKLGIRPRQVAIWFQNRRARWKNKQIEQDYESLKTKYEAVIKEREVILLQHEAAMQENKRLQAEVRRLMDLVEATGVGACDVTGVSEGKSELMSPSKSTGRSRVTCKTRVKCHSIAVSASGADVPMPRFELDYGFCRSNDMGVDLHECPTFSLWRIFLGLICPCLFVKFASK

SEQ ID NO: 4259 - protein, 318 aa, Zea mays
MASSSPSCRGSGGKSDVDRIKGPWSPEEDEALQRLVARHGARNWSLISRSIPGRSGKSCRLRWCNQLSPQVEHRPFTAEEDDTILRAHARFGNKWATIARLLSGRTDNAIKNHWNSTLKRKYYAASDAVVADADDERPLKRTSSDGHPGLCFSPGSPSGSDLSDSSNHSLPSVMPSAASAAAVTSHQQQQHVYRPVPRAGGVVMLPVAPLVPPPPQPPATSLSLSLSLPGLDGQKPEPSPAVLTPAPAPPQPPLQIQQQQPAPPQMPPPQAQPSLPFQLQAAATNLTSQHLALALFSSDFLLLMHDMIRIEVRNYMSG

SEQ ID NO: 4260 - protein, 239 aa, Ceratopteris richardii
  misc_feature (15)..(15): Xaa can be any naturally occurring amino acid
  misc_feature (63)..(63): Xaa can be any naturally occurring amino acid
HGKREPVGIQGAPLXLFLAHQCGPASAVGNGRKRGSTMLERGADCSSFSESFDHDRTGDDGFXRGSEEEAQGRRLVVRKKLRLSKEESALLEEKFEEHSTLTPKQKNALAKQLNLQPRQVEVWFQNRRARTKLKQTEVDCELLRKCCASLTEENRRLQMEVDQLRALSTTQLHFSDFVVANTGLFLDAPLAICPQCQRHFCWICKQRQSSITTSNSCLHQAPARFNSLFSQPQPSFSQN

SEQ ID NO: 4261 - protein, 214 aa, Ceratopteris richardii
SKAYTQRERLSTTESFPLSMKRDREKMDFETNTSNFNITNNLCEVSSRASDEEDGASTRKKLRLTKEQSAFLEESFKEHSTFNPKQKSALAKQLNFRPRQVEVWFQNRRARTKLKQTEVDCELLKRCCESLTEENRRLQKEVQELRALKMGAPCVVAHDFYMPLPAATLAMCPSCERLSTLDPSSRPPPKQHMSSAPLVSLAFNSHHPQPSAAC

SEQ ID NO: 4262 - protein, 242 aa, Akebia trifoliata
MGRGRVQLKRIENKINRQVTFSKRRSGLLKKAYEISVLCDVEVACIVFSDKGRLYEFSTESRMERILERYERCSLAAEEIATIDPQSQGSLPLESRRLKARLDVLQKTQRRFMGEDLDSMSIKEIQNLEQQLDASLKQIRLRKNQLMYESICELQKKETALQEQNNQLGKKIKEKEKTLTQQVNWEQPNQGQNSPAFLQSQTLVSLNIGGPYQARSGEEEERVQSHTQPSTVLPPWMLGHVN

SEQ ID NO: 4263 - protein, 194 aa, Ceratopteris richardii
NQGHRKHPSKDVTKDIGDGDELMCGVEKKRRLTAEQVNFLETSFSMDLKLEPERKAHLAKQLGIQPRQVAIWFQNRRARWKNQQIEQDYESLKASYEAVVEEKERLLKEHDLALEANKRLQAEVCFKHAMSLLWSGYEESHVNIYSMTDSITNAYFHCLTRRHSSLILLHFSSQHTLIGFGGICDAWSPTFRYI

SEQ ID NO: 4264 - protein, 254 aa, Brassica rapa subsp. chinensis
MGRGRVEMKRIENKINRQVTFSKRRAGLLKKAHEISILCDAEVSLIVFSHKGKLFEYSSESCMEKVLERYERYSYAEKQLKAPDSHVNAQTNWSMEYSRLKAKIELLERNQRHYLGEDLESISIKELQNLEQQLDTSLKHIRSRKNQLMHESLNHLQRKEKEILEENSMLTKQIKERESILRTHQNQSEQQNRSHHVAPQPQPQLNPYMISHQASPFLNMGGMYQGEDPTAVRRNRLDLTLEPIYNCNLGYFAA

SEQ ID NO: 4265 - protein, 221 aa, Oryza sativa (indica cultivar-group)
MEQHSHCWYYGGGMAVTAAAGAGAASSTSSESQPSGYDYETAGSAEVSAPGGGAGRERAARKEEGGAGAAAAAAGFIGVRKRPWGRFAAEIRDSTRNGVRVWLGTFETAEAAAMAYDQAALSARGAAAALNFPVERVRESLRALALGAAGGSPVLALKGRHSKRKRRKRSELAGATATANKTTTTTSATTGGEHKQIVLELEDLGADYLEELLWMSEQTSH

SEQ ID NO: 4266 - protein, 95 aa, Brassica rapa var. rosularis
MGRGRVEMKRIENKINRQVTFSKRRAGLLKKAHEISILCDAEVSLIVFSHKGKLFEYSSESCMEKVLERYERYSYAEKQLKAPDSHVNAQTNWSM

SEQ ID NO: 4267 - protein, 410 aa, Oryza sativa (indica cultivar-group)
MAEHFSHAGMYIGYTADAAASSSSSSSSSSSSSSEMLRFDTGWPDETPAPSSVAGRRRSAGGDHRQGRGQTEAAAAFIGVRRRPWGRFAAEIRDSTRNGARVWIGTFDSAEAAAMAYDQAALSARGAAAALNFPVERVRESLHALSLGAAGGSPVLALKRRHSKRKRRKKAELLAAAAATAATANATPQTRRISKSTELTTATTDEQKRFVVELEDLGAEYLEELLWLSEINGVTNCLPTLENKKKRKLEVSNVCSICGVETEDTGHALYRCPHAFLFWEAMGVDLRRVLPSGIAAGSTPGILDHLGRIAESERAVTLMTLWRIWHARNEVTHGKPVPGIAASKRFIESYIHSLAEIKQHQEPTLLRANMWWMLARRSPVCQFRYSVTRAQNGRYHKHLDEVECGWVLPS

SEQ ID NO: 4268 - protein, 179 aa, Glycine max
MLSALTPSDPFSPFSPFSAGFTPWDDNDDSHALFSPKPVSASSSASDYKSEPNPTEHVCASSSVMMDERKRRRMISNRESARRSRMRKQRHLENLRNQLNKCRVENRELGNRLQFFLHHLNRLRTENEWLRSERTLLRQKVANLTQILIFQQFQTTFSPAAWTTCTNNNTTSLMTINQV

SEQ ID NO: 4269 - protein, 409 aa, Oryza sativa (japonica cultivar-group)
MASHAGGSGGGGGGSGRDAGSAQRGPMQGLARQGSLYGLTLNEVQSQLGEPLLSMNLDELLKSVFPDGADLDGGGGGGGIAGQSQPALGLQRQGSITMPPELSKKTVDEVWKGIQDVPKRGAEEGGRWRRERQPTLGEMTLEDFLVKAGVVTDPNDLPGNMDVVGGAAAAAAGTSDLNAGAQWLQQYHQQALEPQHPSIGAPYMATHLAPQPLAVATGAVLDPIYSDGQITSPMLGALSDPQTPGRKRCATGEIADKLVERRQKRMIKNRESAARSRARKQAYTNELENKVLRLEEENERLKKQKPTFILSSKVSRKQVTKAMRSATICVLCICILMILQCFASISAVDLGDAAASASGGEGLIRPRKLLQNAPAARSPPSRSAAAVEVEVNASLGKQKPSSKSNPRQN

SEQ ID NO: 4270 - protein, 263 aa, Triticum aestivum
  misc_feature (77)..(77): Xaa can be any naturally occurring amino acid
  misc_feature (134)..(134): Xaa can be any naturally occurring amino acid
MSSSAMEALHALIPEQHQRDVEAAAALSGATSGEESGHVLQGWAKRKRSRRQRSEEENLALCLLMLSRGGKQRVQAXPQPEAFAAPVPAEFKCSVCGKSFSSYQALGGHKTSHRVKQPSPPADAAAAPLVALPXAVAAVLPSAEPATSSTAASSDGTTNRVHRCSICQKEFPTGQALGGHKRKHYDGGVGAAASSTELLAAAAAESEVGSTGYGSSAARAFDLNIPAVPEFVWRPCAKGKMMWEDDEEVQSPLAFKKPRLLTA

SEQ ID NO: 4271 - protein, 446 aa, Glycine max
  misc_feature (387)..(387): Xaa can be any naturally occurring amino acid
  misc_feature (402)..(402): Xaa can be any naturally occurring amino acid
  misc_feature (427)..(427): Xaa can be any naturally occurring amino acid
  misc_feature (429)..(429): Xaa can be any naturally occurring amino acid
  misc_feature (440)..(440): Xaa can be any naturally occurring amino acid
HGWAHEIAQLPCDSDGVCMLCKLKPSPSQTLSCGTCATPWHLPCLPSPPLSLSDSHWDCPDCSDTFCHHPVAPTAHLVSAIHAIQADTSLTDQQKAIKRQQLLAGSAHPSKDKTKAKDIFDGSLNCSICMQLPDRPVTTPCGHNFCLRCFEKWIGQGKRTCANCRAQIPTKMASQPRINSQLAMAIRLAKAAKSEGSSGPPKVYHCPRNQDRPDTAFTTERAKKTGKANACSGKIFVTVPPDHFGPIPAENDPTRNRGVLVGDTWEDRMECRQWGAHLPHVAGIAGQSAYGSQSVALSGGYEDDEDHGEWFLYTGSGGRDLSGNKRTNKLQSFDQKFENMNEALRVSCRKGYPVRVVRSHKEKRSSYAPESGVRYDGVYRIEKCWRXNGIQGCKVCRYLFVXRCDNEPAPWTSEEIGDRPRPLPKLXEXGAVDVTERRVXPSWDYD

SEQ ID NO: 4272 - protein, 617 aa, Oryza sativa (japonica cultivar-group)
MLAGCSFSSSRHQMSTAQRFDILPCGFSKRGSRGDGAAPRVAGDARSGATTCSFRTHPAPPVTQSVSWGAKPEPGGNGNGAHRAVKRAHDEDAVEEYGPIVRAKRTRMGGDGDEVWFHQSIAGTMQATAAGEGEEAEEEKVFLVPSAAAFPHGMAAAGPSLAAAKKEEYSKSPSDSSSSSGTDGGSSAMMPPPQPPEFDARNGVPAPGQAEREALELVRALTACADSLSAGNHEAANYYLARLGEMASPAGPTPMHRVAAYFTEALALRVVRMWPHMFDIGPPRELTDDAFGGGDDDAMALRILNAITPIPRFLHFTLNERLLREFEGHERVHVIDFDIKQGLQWPGLLQSLAARAVPPAHVRITGVGESRQELQETGARLARVAAALGLAFEFHAVVDRLEDVRLWMLHVKRGECVAVNCVLAMHRLLRDDAALTDFLGLARSTGATILLLGEHEGGGLNSGRWEARFARALRYYAAAFDAVDAAGLPEASPARAKAEEMFAREIRNAVAFEGPERFERHESFAGWRRRMEDGGGFKNAGIGEREAMQGRMIARMFGPDKYTVQAHGGGGSGGGEALTLRWLDQPLYTVTAWTPAGDGAGGSTVSASTTASHSQQS

SEQ ID NO: 4273 - protein, 184 aa, Zea mays
PKPVIFTRDSRNIWKTGTDGSRFTSLPQRRSRSRDMQSQQQLQGSEAVQAPGRKKLKRPAGPSGREEPDDGGGGDDDEPPRRSRNTKDAQTSTSAVRGLLRDFFEQQLRLDAQRQETMERRARERLFFEDQWRQSMQRIEQERLMLEQAWAEREEQRRMREEDRAERRDALLTTLLTRLLQGDL

SEQ ID NO: 4274 - protein, 425 aa, Arabidopsis thaliana
MGEEISSTVNLDLNLGPDPELGLEPATNYARSDWGNGLAARESESLRRFRSRYRSRFRRIDMLPVLAETHSPAMELSQLLITSGNVVALPAGEGSMASGERVIEDSKKCENGSKVMAEDNVTEEKRDVEKSVGSDGSFFDCYICLDLSKDPVVTNCGHLYCWSCLYQWLQVSEAKECPVCKGEVSVKTVTPIYGRGIQKRESEEVSNTKIPSRPQARRTESLRTTLNRSGHIPTEIFRHLQDRLERESSTGERRARPSLNRFMTSRGVRAEENQSSEALVEPSSDEINDIDLILNNAPENEEENENLSSSRALATQRRWAQMYGRVSSFTLSSAERLADTYLITHALGRNQEQNSSPPVGVEDRDSFSSIVGVINSESQVETAAEINSMLTVSTSSSVRRHENSSRVSDVDSADSRPLRRRRRLA

SEQ ID NO: 4275 - protein, 258 aa, Arabidopsis thaliana
MEGGASNEVAESSKKIGRGKIEIKRIENTTNRQVTFCKRRNGLLKKAYELSVLCDAEVALVIFSTRGRLYEYANNSVRGTIERYKKACSDAVNPPTITEANTQYYQQEASKLRRQIRDIQNLNRHILGESLGSLNFKELKNLESRLEKGISRVRSKKHEMLVAEIEYMQKREIELQNDNMYLRSKITERTGLQQQESSVIHQGTVYESGVTSSHQSGQYNRNYIAVNLLEPNQNSSNQDQPPLQLRDLIIYIYLDYVS

SEQ ID NO: 4276 - protein, 337 aa, Brassica oleracea
MGRSPCCDQDKGVKKGPWMPEEDYKLVAYIDKNGYGKWRSLPNIAGLNRCGKSCRLRWMNYLRPDIRRGEFTEEEESTVVKLHALLGNKWSKIASHLPGRTDNEIKNYWNTHMRKKMLQMGIDPITHEPKTNDLSPILDVSQMLAAAIGNGQFGNNTLFNNNIAVEDLLKLQLIHKMLQIITPKAMPNTNSFNTNSLDTKPVANNIKTNPVNPKPEQAAGQLNAIDPHVFTSQIENEDFMPSFEDAWDCFGDNQLPGLVMVSQENLNYQTGAGMMPDYYGDQLREVPSTGSISVTPETSGLNYPGTTQHSSGSNVQEDWEKFLDDETSDSCWKSFLE

SEQ ID NO: 4277 - protein, 220 aa, Ipomoea batatas
MVRGKTQMRRIENATSRQVTFSKRRNGLLKKAFELSVLCDAEVALIIFSPRGKLYEFASSSMREIIERYRRHTADVQSENPSVEQEQDMQHLQHETECLAKKIDYLEASKRRLLGEDLGACAMEELQQIEQQLERSVNIIRARKMEVYAEQIKRLRDKEESLKAENAVLWDKYNGLQPQQVSNEGNEKESAEGSEKSDVETELFIGLPESRAKPVLSNER

SEQ ID NO: 4278 - protein, 305 aa, Oryza sativa (japonica cultivar-group)
MKRPSCRGSSMAIIHDTSDQQEDNMRSYMDGGGAAAYEEEEEEVEDDDGGGGGGGGGGGGGLGEKKRRLAAEQVRALERSFEADNKLDPERKARIARDLRLHPRQVAVWFQNRRARWKTKQIERDFAALRSRHDALRLECDALRRDKDALAAEIADLRDRVDGQMSVKLEAVAADEHQPPPPPPPPPLAYNSKVVDGSTDSDSSAVFNEEASPYSGAAIDHHHHQTPASYDTAGFTSFFAPSTTLTSSLSFPSMFHASSHFDGHQELLVGGGGAGAVADADLGGAGFFAGDEHAGGLSWYGAEGW

SEQ ID NO: 4279 - protein, 381 aa, Arabidopsis thaliana
  misc_feature (186)..(186): Xaa can be any naturally occurring amino acid
  misc_feature (191)..(191): Xaa can be any naturally occurring amino acid
MRLNGDSGPGQDEPGSSGFHGGIRRFPLAAQPEIMRAAEKDDQYASFIHEACRDAFRHLFGTRIALAYQKEMKLLGQMLYYVLTTGSGQQTLGEEYCDIIQVAGPYGLSPTPARRALFILYQTAVPYIAERISTRAATQAVTFDESDEFFGDSHIHSPRMIDLPSSSQVETSTSVVSRLNDRLKRXWHRAXQRWPVVLPVAREVLQLVLRANLMLFYSEGFYYHISKRASGVRYVFIGKQLNQRPRYQILGVFLLIQLCILAAEGLRRSNLSSITSSIQQASIGSYQTSGGRGLPVLNEEGNLITSEAEKGNWSTSDSTSTEAVGKCTLCLSTRQHPTATPCGHVFCWSCIMEWCNENQECPLCRTPNTHSSLVCLYHSDF

SEQ ID NO: 4280 - protein, 217 aa, Cryptomeria japonica
MVRGKVNLQRIQNPVNRRVTFSKRKAGLLKKAGELSVLCEAEICSIIFSPTGKLFEFASHSMNRIIGKYKKNCASIGHHIQLQEHLETLRMELENLRIETTHLEKTCKHMNGEDLDFLNFKELQKLEKKMSLSARKIHLRKDKILVENVGSLKSKEKLLELENAEMDKKIGRSHKACHLNINMMDEVNSKLETEASTRQDCLKLTLISRNFHDDNFC

SEQ ID NO: 4281 - protein, 516 aa, Oryza sativa (japonica cultivar-group)
MISRVSAIFSVPRESACVLLRHYKWSISKLSDDWFADEENVRRSVGLPSNVVHVPDCPELTCGICFEGCAANAMSCAGCSHFYCHECWEGYISAAVNDGPGCLVLQCPEPSCDAIVLEDMINSLTKDEDKVKYARFVLWSYIGVNNKIKWCPAPDCTCAVEFLGDGNYDVSCKCKFSFCWNCAEEAHRPVSCDTVSKWILKNSAESENMNWILAYSKPCPKCKRPIEKNQGCMHMTCTPPCKFEFCWLCLGAWSDHGDGTGGFYACNRYQSAKMGGMYDEAEARRERAKNSLERYMHYYERWASNQTSRQKAQADLQKVENEDLTKLSDVVGIPETQLKFIPEAWSQIIECRRVLKWTYAYGYYLHNKAKSDFFVYLQGEAESGLERLHKCAEKDMREFLPTADSTQPSLSLQDFGEFRVKLSGLTSVTRNYFENLVQTLEAGLQDVRATDQSASVSTSSSKKPPTNTKGKSGRSKVARTSQERSGDRWPCDRCTFINPSSTNSCNMCGRNKPRRR

SEQ ID NO: 4282 - protein, 120 aa, Brassica napus
  misc_feature (25)..(25): Xaa can be any naturally occurring amino acid
  misc_feature (65)..(65): Xaa can be any naturally occurring amino acid
  misc_feature (72)..(72): Xaa can be any naturally occurring amino acid
  misc_feature (111)..(111): Xaa can be any naturally occurring amino acid
MASDDSSSSHPTEKKEEASAAAAAXGAGFDDLEDPRFQCCVCLELLYKPVVIACGHMSCFWCVHXAMHYARXSHCAICRQPYTHFPSICQLLHHLLLKLEPVEYKKREMEXLEQERSVDT

SEQ ID NO: 4283 - protein, 143 aa, Medicago truncatula
MDGSWGEGKRIYEYREENEYEVEVEIEEEEDVSYGDDEKRKRVVTDHLYNKKGSKAGGSVTPSCQVDNCNADLSAAKQYHKRHKVCENHSKAHSVLISELQQRFCQQCSRFHEVSEFDDLKRSCRRRLAGHNERRRKSASEYH

SEQ ID NO: 4284 - protein, 216 aa, Oryza sativa (japonica cultivar-group)
MSDRDVDMHILTALMADMADSSSSSSSSSSSSSSDEFDMRASAAAAEPEHRRSPAPPPPPRQQQLIGVRKRPWGKFAAEIRDSTRKGARVWLGTFDSPEAAAMAYDQAAFSVRGASAVLNFPLHRVQESLQALALGAAGGSPVLALKRRHSIRKRRKPTKHMLLMQQQQQEPTVVELEDLGADYLEELLRLSESSSSSSSSSISNFTTTPNRHCQS

SEQ ID NO: 4285 - protein, 449 aa, Oryza sativa (japonica cultivar-group)
MAQQQKKNAHVPKFGNWDNGGNVPYTVYFENARKGKVAAAGKMFNPNDPVDNPEAFSSSIAAPSPSRAPPPPPSHHERAPSDAPPPPPPAPYAGGSPYHRHAAGGGETPPARRGGGRTSGGGGSSYSVEHSPSPSPLHPYSDSGSGSYGGGLVANSRAKGGGGGAPRGNETPTRGSAVPRFGDWDSNPASADGYTHIFNKVREEKQTGQAAGKPAAGLGKGGAAAAGHGNAAKRYHDDDFASTVIPNIIRIMSTASTARSRKRAHDGSRQKVDVINLETTAPVVNTGSQHEALILRGTRTSPIDVEALDDKRRSRKIMRRSVAVVDPEKDTGPGGYGVAGAIFSRGRNFQGAVHVICLSPDREEGTSKPKNVAQTSTTHAKVAPKEPTFTCPVCLNKLDKPSTTNCGHIFCEKCIQAWLKAQKKCPTCRKSLGIKSFHRVYLPTPADYD

SEQ ID NO: 4286 - protein, 360 aa, Oryza sativa (indica cultivar-group)
MEGNGCGGSGATPRGVVGMHWAPVVTSPPSPQPPFLPPAPCRPDVQMQQQGGLTCLKLGKRPCFWGGDGAGQVAQGSGGGGGGGGGGSADQGKRKEKAATAVPVVPRCQVEGCDITLQGVKEYHRRHKVCEVHAKAPRVVVHGTEQRFCQQCSRFHVLAEFDDAKKSCRRRLAGHNERRRRSNASEAMARGSAHPHGMPVLGHGFPPYGLPTSSAGALSLLSSARATGPWLMPTPDISARSSAALDELIAENRAALLSWQFFSDRQPPPAGRPTGRSPGSETAGGWHAHLQARPPPPGAGGQHEHQSGHVTLDLMQATTAAGGSGAPFRPVPARPAKEGGDAGCTSDAWTPSPMEGARVV

SEQ ID NO: 4287 - protein, 603 aa, Oryza sativa
MDTLFRLVSLHHHHHHQHAASPSPPDQPHKSYPSSRGSTSSPSSHHTHNHTYYHHSHSHYNNNSNTNYYYQGGGGGGGGYYYAEEQQPAAYLEECGNGHQFYMDEDFSSSSSSRQFHSGTGAPSSAPVPPPPSATTSSAGGHGLFEAADFSFPQVDISLDFGGSPAVPSSSGAGAGAGAAPSSSGRWAAQLLMECARAVAGRDSQRVQQLMWMLNELASPYGDVDQKLASYFLQGLFARLTTSGPRTLRTLATASDRNASFDSTRRTALKFQELSPWTPFGHVAANGAILESFLEAAAAGAAASSSSSSSSSTPPTRLHILDLSNTFCTQWPTLLEALATRSSDDTPHLSITTVVPTAAPSAAAQRVMREIGQRLEKFARLMGVPFSFRAVHHSGDLADLDLAALDLREGGATAALAVNCVNALRGVARGRDAFVASLRRLEPRVVTVVEEEADLAAPEADASSEADTDAAFVKVFGEGLRFFSAYMDSLEESFPKTSNERLSLERAVARAIVDLVSCPASQSAERRETAASWARRMRSAGFSPAAFSEDVADDVRSLLRRYKEGWSMRDAGGATDDAAGAAAAGAFLAWKEQPVVWASAWKP

SEQ ID NO: 4288 - protein, 95 aa, Brassica oleracea var. capitata
MGRGRVEMKRIENKINRQVTFSKRRAGLLKKAHEISILCDAEVSLIVFSHKGKLFEYSSESCMEKVLEHYERYSYAEKQLKVPDSHVNAQTNWSM

SEQ ID NO: 4289 - protein, 396 aa, Arabidopsis thaliana
MWLSHLFMSLSKLTCNFSIFSVFMACGSIGMSQVRDTPVKLFGWTITPVSHDPYSSSSHVLPDSSSSSSSSSLSLRPHMMNNQSVTDNTSLKLSSNLNNESKETSENSDDQHSEITTITSEEEKTTELKKPDKILPCPRCNSADTKFCYYNNYNVNQPRHFCRKCQRYWTAGGSMRIVPVGSGRRKNKGWVSSDQYLHITSEDTDNYNSSSTKILSFESSDSLVTERPKHQSNEVKINAEPVSQEPNNFQGLLPPQASPVSPPWPYQYPPNPSFYHMPVYWGCAIPVWSTLDTSTCLGKRTRDETSHETVKESKNAFERTSLLLESQSIKNETSMATNNHVWYPVPMTREKTQEFSFFSNGAETKSSNNRFVPETYLNLQANPAAMARSMNFRESI

SEQ ID NO: 4290 - protein, 145 aa, Ashbya gossypii ATCC 10895
MQALGGNEEPPAETDELDVFHNVGQGLAGRYREIMVQYWQQLINEIESTNEPGSPHRDDFKSHSLPLARIKKVMKTDEDVKMISAEAPILFAKACEIFITELTMRAWCIAEENKRRTLQKQDIAQALQKSDMFDFLIDIVPRGLE

SEQ ID NO: 4291 - protein, 503 aa, Ostreococcus tauri
MNGDGGVESSRASGGTDVPGEDAARTRATPSATSRKDKSLWTLCERFLTIYGDGSKESVSLDDAATRLGVERRRIYDVANVLESVEVLERKAKNQYTWHGVRRLPECLKRLKESGLREFGTDVELDGSTSEGRDGEKEDGTARGGDASDRSSPTNSSTINLDAKQRGEKVTGTKFFGQGRFAVSSASYDSRREKSLGLLSQKFVQLFLASKMNVVSLETAARIIMGEDDDDEAKLKTKIRRLYDIANILCSLRLIRKVHVGETRKPAFLWLQRENSIAELIAQGKGLMWFDKLNEEEEMRLQASIIESKLDGNEVLMVDAENKRRGAFYDSQTKSGSKRPRGRPRLPGGDVDALPSSVPPLGASSMTPEEAARFNQLFAFTTSQLMAQYPLDVRADVNSIMAQSAMGNANYLHLLAQSSVAQAHAARRMENTAKGMSSDSSIDNTAMFVPPLPAFPAMLPAWGMSGLSYHSNHMEHMMRMYETSLATISDNDPSHPDGKIAEQ

SEQ ID NO: 4292 - protein, 95 aa, Brassica oleracea var. gongylodes
MGRGRVEMKRIESKINRQVTFSKRRAGLLKKAHEISILCDAEVSLIVFSHKGKLFEYSSESCMEKVLEHYERYSYAEKQLKVPDSHVNAQTNWSV

SEQ ID NO: 4293 - protein, 95 aa, Brassica oleracea var. gemmifera
MGRGRVEMKRIENKINRQVTFSKRRAGLLKKAHEISILCDAEVSLIVFSHKGKLFEYSSESCMEKVLERYERYSYAEKQLKAPDSHVNAQTNWSV

SEQ ID NO: 4294 - protein, 202 aa, Triticum aestivum
MGRGKIEIKRIENATNRQVTYSKRRSGIMKKARELTVLCDAQVAIIMFSSTGKYHEFCSTGTDIKGIFDRYQQAIGTSLWIEQYENMQRTLSHLKDINRNLRTEIRQRMGEDLDALEFEELRDLEQNVDAALKEVRQRKYHVITTQTETYKKKVKHSQEAYKNLQQELGMREDPAYGFVDNPAAGGWEHGMAYGGSHDLRLG

SEQ ID NO: 4295 - protein, 287 aa, Glycine max
ANLSGYSFKREEFDVEYDNDAEQVLADMEFKDTDTEAEYEMKLQVLHIYSKRLDERKRRKNFILERDLLYPDPFEKSLLPEELQICQRYKVFMRFHSKEEHQDLLKNIIEEHRLVKRIQDLQEARIAGCVTAADAYRFIEQKRTKEAEPSACKESGQIGTSAKTLQRPNSLKGEVDSSPQGLQKGTAALFAGAKDSPPAIQVFTRSLEEWDISGFAGAELLSESEKKLCDEIRILPSHYLNMLQTLSLEISKGSVTKKSDAHALFKVEPSKVDRVYDMLVTKGVVQT

SEQ ID NO: 4296 - protein, 212 aa, Glycine max
MKAMKRCSSSSSSSYSSASESTPQSNQNKNSNNFCYKIKGPWSAKEDRILTGLVEAHGPRNWASISRHIKGRSGKSCRLRWCNQLSPTVEHRPFSTREDEVILHAHARFGNKWATIARMLPGRTDNAVKNHWNATLKRRRFGADVVVEDDPLTALTLAPPGSGCCGRGEERRGVSPAGFWDAMRDVVAREVRGYVSSSFSDNLASNEGLSKY

SEQ ID NO: 4297 - protein, 232 aa, Ostreococcus tauri
MSLSTSPVLAAAASNDLSQIRWLIERENVPVDFVGDWYAEPRSGGKGLERQRRTPCMVAASHGALEVLLYVLQMGADPNKRSEDDERCTAMHCAAAGGAALSTEAIRTLLMFGADRNARDMYGRVPADCLPSTTSDPMYGSSDAGGSSSGGSASTGGNRGHGPSSQAVNSQAALQDPDEETLMSDEFRMYEFKIRRCSRTRAHDWTECPYTHPGEKARRRDPRRFNYCGTAW

SEQ ID NO: 4298 - protein, 227 aa, Oryza sativa (indica cultivar-group)
MGRGKIAIKRIDNTTNRQVTFSKRRGGLMKKARELAILCDADVGLIVFSCTGRLYDFSSSSMKSIIERYQEAGEEHCRLLNPMSEAKFWQREVTTLRQQVQNLHHNNRQLLGEEISNFTVRDLQLLQNQVEMSLHSIRNKKDQLLAEEILKLNEKGSLVQKENSELRKKFNIAHQRNIELHKKLNSGESTSSEQVTRSSKDPGESSTPRDSRVCIDLELSQKEVEDE

SEQ ID NO: 4299 - protein, 590 aa, Arabidopsis thaliana
MALKSSSADGKTRSSVQIFIVFSLCCFFYILGAWQRSGFGKGDSIALEMTNSGADCNIVPSLNFETHHAGESSLVGASEAAKVKAFEPCDGRYTDYTPCQDQRRAMTFPRDSMIYRERHCAPENEKLHCLIPAPKGYVTPFSWPKSRDYVPYANAPYKALTVEKAIQNWIQYEGDVFRFPGGGTQFPQGADKYIDQLASVIPMENGTVRTALDTGCGVASWGAYLWSRNVRAMSFAPRDSHEAQVQFALERGVPAVIGVLGTIKLPYPTRAFDMAHCSRCLIPWGANDGMYLMEVDRVLRPGGYWILSGPPINWKVNYKAWQRPKEDLQEEQRKIEEAAKLLCWEKKYEHGEIAIWQKRVNDEACRSRQDDPRANFCKTDDTDDVWYKKMEACITPYPETSSSDEVAGGELQAFPDRLNAVPPRISSGSISGVTVDAYEDDNRQWKKHVKAYKRINSLLDTGRYRNIMDMNAGFGGFAAALESQKLWVMNVVPTIAEKNRLGVVYERGLIGIYHDWCNADDILLEMDRILRPEGAVIIRDDVDTLIKVKRIIAGMRWDAKLVDHEDGPLVPEKVLIAVKQYWVTNSTSTH

SEQ ID NO: 4300 - protein, 371 aa, Cryptococcus neoformans var. neoformans JEC21
MASTARKTFEINNNVQVVDPSAAIFQYSREEEKLLDDEAPWRTDPHYFHTVKISAVALIKMVTHARSGGIYEIMGIMYGKVRDGTFWIMDVAALPVQGTETRVNAGNEAMEYMVNFQTANAEAGKGELLRGWYHSHPGYGCWLSGIDVNTQLNNQKFNDPYLAVVIDPNRTVSAGKVEIGAFRTYPEGYTPPATGNSQYQSIPMDKIEDFGVHANAYYPLKVEIYKSKLDEKMLDLLWNKYWVATLSSNSLVSNLEYSTSQVQDLNAKLRAASQSISNSSSKLKLKPTQPTTKGKETTEGSDKKLKKGEKEFSGVEEEETPLNKVTQESSRITSEAENGIISQLLKEKLFNTPLTQSVDDKSAQATVQGRY

SEQ ID NO: 4301 - protein, 338 aa, Zea mays
  misc_feature (17)..(17): Xaa can be any naturally occurring amino acid
MSMSFLSMVEAELPPGXFRFHPRDDELICDYLAPKLGAKPGFSGCRPPMVDVDLNKVEPWDLPVAASVGPREWYFFSLKDRKYATGQRTNRATVSGYWKATGKDRPVVAARRGALVGMRKTLVFYQGRAPKGRKTEWVMHEYRMEPAAPLLDHQPSSSNSKDEDWVLCRVICKKKLAAGGRAGGGSSRSLVASNGGRETAPATPPPPPLPPRMDTDATLAQLQAAMHATAGALEQVPCFSSFNNNTTASSRAAAAAAAAAAQPCYLPSMATGGSHGTTSYYLDHAMLPPELGGCFDPLHGDKSCSRRCWASSAATRWRRACTCSTRWPPALSSLRPLG

SEQ ID NO: 4302 - protein, 345 aa, Zea mays
MRPMASNGMASSPSPFFPPNFLLQMQQTPSDHDPQEHHHLPAPPLHLHHNPFLPSSQCPSLQDFRGMAAPMLRKRPTMYCGADDVGVGGEEANCGATNEDEVSDDGSLQAVGPGEKKRRLNVEQVRTLEKNFELGNKLEAERKLQLARALGLQPRQVAIWFQNRRARWKTKQLEKDYDALRRQLDAVKADNDALLSHNKKLQAEILALKGREAAGGSSELINLNKETEASCSNRSEDSSEINLDISRTPPASEGPMDHPPPPPPHHAAGGGLIPFYPSVGGRHSIAAGVGMDQLLHASTPKLEQHGDGCAVAVQAAETAGSFGNLLCGVDETPPFWPWADHHHFH

SEQ ID NO: 4303 - protein, 207 aa, Triticum aestivum
MRRGGGAATAVAAAAEAERDAGARFRGVRKRPWGRYAAEIRDPAKKARVWLGTFDSAEDAARAYDAAARMLRGPKAKTNFPLSLPHHHQLQASYSPYPVAAAAAVPTSVAAAAARPACSSLSSTVESFGGPRARPVLPPRPPPPPILDGDCHSDCGSSASVVDDDCADAAASPSCGLLLPFDLNLPPEFGGVACNDDDELKLTALRL

SEQ ID NO: 4304 - protein, 248 aa, Populus tremuloides
MGRGRVQLKRIENKINRQVTFSKRRTGLLKKAHEISVLCDAEVALIVFSHKGKLFEYSTDDCMEEILERYERYSYAERQLVATDLDSQGDWTLEYNRLKAKVELLQRNHRNYVGEDLDSMSLKELQNLEQQIETALKHIRARKNHLMSQSISEMQRKEKAIQVQNNMLVKQIKEKEKKDKAVAQPAFWDQQNHGPDASSFLLSQPAGLPLPCLNIGGSYQEEAPEARRNGLGHTLEPIYSFHLGGYGA

SEQ ID NO: 4305 - protein, 240 aa, Populus tremuloides
MGRGRVQLKRIENKINRQVTFSKRRAGLLKKAHEISVLCDAEVALIVFCHKGKLFEYSTNACMEKILERHERYSYAERQLVATDLDSQGNWTLEYNRLKEKVELLQRNHRHYLGEDLDSVSLKELQNLEKQIDTALELIRERKNHLMYQSISELQIKEKAIKEQNNMLVKQIKEKEKALAQPALWDQQDHGPNASSFLLPQPPLPCLNISYQEEDPIARRNELDLTLEPIYSCHLGCFGT

SEQ ID NO: 4306 - protein, 717 aa, Oryza sativa
MVTVTIQHTFSLERNQRMQEDQSVLGRRRIYYDTNCGEALICSDSEDEAVEDEEEKKEFKDSEDCIIRMTIQECGMSDAVLETLARDIERAPDDIKARYEILQGEKPEGSSKKVSELNVKMEDVYGDKDLDAALDSFDNLFCRRCLVFDCKLHGCSQDLVFPTEKQAPLCSSDEGTPCGIHCYKLVSKPDAIMEIDSHLLVDVEEPTSDNLKDQIGSNKKKLGSSGQKTKSQQSESSSTARVSSESSESEGQQEMSPDSNSIVNGCHWPRDMKLRSDTRSGIKDSVVSSQCNSPSTRSFRKKGTLQMENNSSFVDAQSDSMEDTNNEHSATDGCDSSRKEECVDESICRQEAHGRSWKVIEQGLLLKGLEIFGKNSCLIARNLLGGMKTCTDVFQYMNYIENSSASGALSGVDSLVKGYMKGNELRTRSRFVRRRGRVRRLKYTWKTAGYHFIRKRITERKDQPCRQYTPCGCQSACGKQCPCLTNGTCCEKYCGCPKMCKNRFRGCHCAKSQCRSRQCPCFAADRECDPDVCRNCWVGCGDGTLGVPNQRGDNYECRNMKLLLKQQQRVLLGRSDVSGWGAFLKNSVGKHEYLGEYTGELISHKEADKRGKIYDRENSSFLFNLNNEYVLDAYRMGDKLKFANHSPDPNCYAKVIMVAGDHRVGIFAKERISAGEELFYDYRYEPDRAPAWARKPEGPGAKDDAQPSTGRAKKLAH

SEQ ID NO: 4307 - protein, 425 aa, Oryza sativa
MAAAADAPPPPPEVAPPAPAPAPAPAPYQPPRLAVADGAGGGGGGGGKPCRHHAYSRKQKSLGLLCTNFVALYDREDVESVGLDDAARRLGVERRRIYDIVNVLESIGMLVRRAKNRYTWIGFGGVPAALAKLKEMSLRAVSSVASPSLDETSAANVSDDEDDDKLDDAEGDAESEKLSLSQSIDNPSDKPDAPPCKLRSEHRKEKSLGLLTQNFVKLFLTMEIETISLDEAAKRLLGEGHAANNMRTKVRRLYDIANVLSSLNLIEKTQQADSRKPAFRWLGQAKRNEGVTVALPPTKTLPNKRAFGTDLTNIDNKRGKLDSTMENRGKPTQDGGNLFNNLQRQLGQENRSDFAYGPFHPAVARKQEHGNRTVQEKERKSIQDWENLASSFRPQYQNPGLNDLFGHYMEARRSWYSDLRRDRAS

SEQ ID NO: 4308 - protein, 220 aa, Oryza sativa (indica cultivar-group)
MQPPPMRESQRWRPEEDAILLAYVRQYGPREWSLVSQRMNRPLHRDAKSCLERWKNYLRPGIKKGSLTDDEQRLVIRLQAKHGNKWKKIAAEVPGRTAKRLGKWWEVFKEKQQRELRDRDRRRLPPPLDGDERGGAGGRYDWLLEDFADKLVNDHHRRMMAAPILPPWMSSSPSSSSSPSVTLSLASAAVAPAPAAPPPTWGGGGGEVVVAELMECCRNM

SEQ ID NO: 4309 - protein, 300 aa, Triticum aestivum
  misc_feature (67)..(67): Xaa can be any naturally occurring amino acid
  misc_feature (75)..(75): Xaa can be any naturally occurring amino acid
  misc_feature (212)..(212): Xaa can be any naturally occurring amino acid
  misc_feature (225)..(225): Xaa can be any naturally occurring amino acid
  misc_feature (244)..(244): Xaa can be any naturally occurring amino acid
MGRPSSGGVGQPKLRKGLWSPEEDEKLYNHIIRHGVGCWSSVPRLAGLNRCGKSCRLRWINYLRPDXKRGCFSQXEEDHIVALHQILGNRWSQIASHLPGRTDNEIKNFWNSCIKKKLRQQGLDPATHKPMAAADTATPALPDAEVEDRKPLAAAADGSLAPKQTAVFDPFPVCADYGARFAEDLGAANAAALYGQFYGGKEAADEDAGFGXAADYSCVLDVPEXLGYYGESSSNSSNRNYGGXEVGSMLDGEVRSVLDGEVLHWAKAEPAFAEMEYEFSLPCQEQSLLPNFEFNLEQYF

SEQ ID NO: 4310 - protein, 1006 aa, Oryza sativa (indica cultivar-group)
MEPGQLPMGARRCIRHQQSTSRLMSVAWSAMWPALRPMSLVRPTPFTAPSVSTCPVAMACCAASTAVWNPNEPPLLDLTVDCRCAAHHVVPTAVGVGRRRSRGGARGTRMQELVLSPQPMFCEEGSSESGYVLCVIDSLKKKITSDRFVYIQKRVEENSIKLSPITLHSHNLSKNRQTSTSNSTDLVSNLLTKRKEDALCAVNSRESSPDESEGANCQDECSSTVIVGGNLSARNSVRPIRLPEVATLPPYTTWIFLDRNQRMQEDQSVLGRRRIYYDTNCGEALICSDSEDEAVEDEEEKKEFKDSEDCIIRMTIQECGMSDAVLETLARDIERAPDDIKARYEILQGEKPEGSSKKVSEHNVKMEDVYGDKDLDAALDSFDNLFCRRCLVFDCKLHGCSQDLVFPTEKQAPLCSSDEGTPCGIHCYKLVSKPDAIMEIDSHLLVDVEEPTSDNLKDQIGSNKKKLGSSGQKTKSQQSESSSTARVSSESSESEVQLLSNKSPQHSPGLSKNKLGAKGGIKKSTNRRIAERILMSVKKGQQEMSPDSNSIVNGCHWPRDMKLRSDTRSGIKDSVVSSQCNSPSTRSFRKKGTLQMENNSSFVDAQSDSMEDTNNEHSATDGCDSSRKEECVDESICRQEAHGRSWKVIEQGLLLKGLEIFGKNSCLIARNLLGGMKTCTDVFQYMNYIENSSASGALSGVDSLVKGYMKGNELRTRSRFVRRRGRVRRLKYTWKTAGYHFIRKRITERKDQPCRQYTPCGCQSACGKQCPCLTNGTCCEKYCGCPKMCKNRFRGCHCAKSQCRSRQCPCFAADRECDPDVCRNCWVGCGDGTLGVPNQRGDNYECRNMKLLLKQQQRVLLGRSDVSGWGAFLKNSVGKHEYLGEYTGELISHKEADKRGKIYDRENSSFLFNLNNEYVLDAYRMGDKLKFANHSPDPNCYAKVIMVAGDHRVGIFAKERISAGEELFYDYRYEPDRAPAWARKPEGPGAKDDAQPSTGRAKKLAH

SEQ ID NO: 4311 - protein, 340 aa, Zea mays
MDLKDSERRGAAGPGPLSRQGSIYSLTFDEFQNTLGGTGGGLGKDFGSMNMDELLRSIWTAEESQAMASASEPAAGAAGDGGAALQRQGSLTLPRTLSVKTVDEVWRDFAREGTAGGPEPQPNRQPTLGEMTLEDFLVRAGVVRDNPAAAAAAAAAVPAQPVATRPLQAVNNGASIFFGNFGGANDAGAGAMGFAPVGIGDQAMGNGLMPGVAGMAAGAVTVSPVDMSVAQLDSMGKGNGDLSSPMAPVPYPFEGVIRGRRSGAGVEKVVERRQRRMIKNRESAARSRARKQAYTMELEAEVQKLKEQNAELQKKQVPELVSNPYAQKKRCLRRTLTGPW

SEQ ID NO: 4312 - protein, 110 aa, Oryza sativa
PRVREDKIKELKAKKAELCYEKQKLKVEKEPLEQQVKILIATPAYMPPPPLMPAPYPQAPLAPFPHAQGQTAGQKLIMPFVGNPGYPMWQFMPPSEVDPSKDSEGGPPFG

SEQ ID NO: 4313 - protein, 249 aa, Vitis aestivalis
MAPKEKVAGVKPSANAKEVHFRGVRKRPWGRYAAEIRDPGKKSRVWLGTFDTAEEAAKAYDSAAREFRGAKAKTNFPLVSENLNNNNQSPSQSSTVESSSREGFSPALMVDSSPLDLNLLHGGGVGVGVGVGVGAAAGYATAMRFPFQHHQFQVSSPSPAAGIVPTGGLPAANHLFYFDAMLRTGRVNQDFQRLRFDRAASDFRAALTGGVQSDSDSSSVVDLNHNDLKPRARVLIDLDLNRPPPPEIA

SEQ ID NO: 4314 - protein, 217 aa, Triticum aestivum
MAPKNALPVAVAAAADAGMEPRFRGVRKRPWGRYAAEIRDPARKARVWLGTFDTAEAAARAYDAAALHYRGPKAKTNFPVGTVAAFAHVPLPPPKALAVSPSSSTVESSSRDTPAAAPAAPAAAAPAPPPALDLSLAMPAMVAAQPFLFLDPRVAVTVAVAAPAPAPCRSAAISGMNKVASREEEQSDTGSSSSVVDASPAVGVGFDLNLPPPVEMA

SEQ ID NO: 4315 - protein, 220 aa, Vitis aestivalis
MAPRDKPTGVTAGATGNKEIRYRGVRKRPWGRYAAEIRDPGKKSRVWLGTFDTAEEAARAYDAAAREFRGAKAKTNFPSPTDLAAAAATTANRSPSQSSTVESSSREALSPGAIAGPPALDLNLSHPAAAGQFSAVRYPAVGVFPIAQPLFFFEPFSRPEKPKTHRDMFDLDRAVADFHPAIAGSVHSDSDSSSVVDFNYHDRSTRLLNLDLNHPPAEVA

SEQ ID NO: 4316 - protein, 282 aa, Arabidopsis thaliana
MSCNNNGLAFFPENFSLQNHHQEEEDHPQLLQDFHGTSSQLTPLFKISNPFFFYFSRSSLFLGFLGKRSPMNNVQGFCNLDMNGDEEYSDDGSKMGEKKRRLNMEQLKALEKDFELGNKLESDRKLELARALGLQPRQIAIWFQNRRARSKTKQLEKDYDMLKRQFESLRDENEVLQTQNQKLQAQVMALKSREPIESINLNKETEGSCSDRSENISGDIRPPEIDSQFALGHPPTTTTMQFFQNSSSEQRMVKEENSISNMFCGIDDQSGFWPWLDQQQYN

SEQ ID NO: 4317 - protein, 110 aa, Zinnia elegans
KIWFQNRRARTKLKQTEVDCEFLKRCCENLTEENRRLQKELQELKALKLSPQFYMQMAPPTTLTMCPSCERVGAPPSQKSIDHQHRKLPFYPWPTSASQVVQRQMGALHH

SEQ ID NO: 4318 - protein, 487 aa, Medicago truncatula
MTMEPNPTSDHILDWLEGSVSFFPSFLDDPYNNGYIHEYEIWNQNQDISNQYQIDANTNSSNATNSTTNIVAASTTTSTTSLEPNSFNNIPFSDLPKKRNAEDELSLKKQPQNQKNKRLKSRPMNESDNGDAALEGTVVRKSGGNKKGAAKANGSNSNNGNNKDGRWAEQLLNPCAVAITGGNLNRVQHLLYVLHELASTTGDANHRLAAHGLRALTHHLSSSSSSTPSGTITFASTEPRFFQKSLLKFYEFSPWFSFPNNIANASILQVLAEEPNNLRTLHILDIGVSHGVQWPTFLEALSRRPGGPPPLVRLTVVNASSSTENDQNMETPFSIGPCGDTFSSGLLGYAQSLNVNLQIKKLDNHPLQTLNAKSVDTSSDETLIVCAQFRLHHLNHNNPDERSEFLKVLRGMEPKGVILSENNMECCCSSCGDFATGFSRRVEYLWRFLDSTSSAFKNRDSDERKMMEGEAAKALTNQREMNERREK

SEQ ID NO: 4319 - protein, 237 aa, Lycopodium annotinum
MGRGKIEIKRIENATCRQVTFSKRRSGLLKKAHELSVLCDAQVAVIIFSSTGKLFQFASTRMKEILERYERNSDPLQIDAVIPRDLEYWSREAAKAKDELDRCHQKNRHMLGEDLSALNLNELEELEQQLDSGLRRVRCRKDQVLRDRIEELTKQESFLREENRMLRSKIAVPKESTEPILDEMNMETREPPSMAIVEEELSLKLNSKTWPDIHFSLQLGQYQPPRTETPTANHRPN

SEQ ID NO: 4320 - protein, 318 aa, Oryza sativa (japonica cultivar-group)
MAVEEASSSSGGGRGGGGGGGGEEGLSGCGGGWTREQEKAFENALATVGDDEEEGDGLWEKLAEAVEGKTADEVRRHYELLVEDVDGIEAGRVPLLVYAGDGGVEEGSAGGGKKGGGGGGGGGGGGHGEKGSAKSSEQERRKGIAWTEDEHRLFLLGLEKYGKGDWRSISRNFVISRTPTQVASHAQKYFIRLNSMNRERRRSSIHDITSVNNGDTSAAQGPITGQPNGPSANPGKSSKQSLQPANAPPGVDAYGTTIGQPVGGPLVSAVGTPVTLPVPAAPHIAYGMHAPVPGAVVPGAPVNMPPMPYPMPPPTSHG

SEQ ID NO: 4321 - protein, 247 aa, Zinnia elegans
MKRHGSSDSVGLMPMCHTLDETREFHSMLMEGLDDDCGGVDGGECDRGLISEKKRRLTAVQVKALEKNFEMENKLEPERKVKLAKELALQPRQVAIWFQNRRARWKTKQLERDYGVLKSNFDSLKHKYESLKQDNESMVKQIKELKSKLYEEDEPDNIPMPEQSDDKPKSPENMVETAYFPDFKDGSSDSDSSAIMGDAQKAYQPQFVKLEEHNFFGGDESCNFFSDDQAPTLQWYCQDQWNLSEEN

SEQ ID NO: 4322 - protein, 222 aa, Canavalia lineata
MARQKIKIKKIDNVTARQVTFSKRRRGIFKKAEELSVLCDAEVGLIIFSATGKLFEYPSSSMKDIITKYNQHSHDNNQLGRPQNLQVEQCVDLSKEVAERNQQLRQMKGEDFQGLNLDDLQQLEKTLETGLERVNETKEKRIMDEIVALHKKGLKLEEENKHLKQKMAMLCMGKSSFLVDSDITLQEVVSSESMNVCSCNSGPSLEDDSSDTSLKLGLPFPN

SEQ ID NO: 4323 - protein, 231 aa, Zea mays
MMNCAGGGDPVEDFLISGAVDDEDLAIFCDGGLGIEGVNGDACGFEQSNLGKRGRDEPCSSGLKSKACREKMRRDKLNDRFLELSSVMNPGKQAKLDKANILSDAARMVAQLRGEAEKLKESNEKLRENIKDLKEEKNELREEKVRLKVEKDRLEQQVKAMSVAPTGYVPHLPHPASYHPAAFAPFVPPQQAAGNKSAPIPAPFPGMAMWQWLPPTIVDTTQDPKLWPPNA

SEQ ID NO: 4324 - protein, 253 aa, Arabidopsis thaliana
MMKSGADLQFPPGFRFHPTDEELVLMYLCRKCASQPIPAPIITELDLYRYDPWDLPDMALYGEKEWYFFSPRDRKYPNGSRPNRAAGTGYWKATGADKPIGRPKPVGIKKALVFYSGKPPNGEKTNWIMHEYRLADVDRSVRKKNSLRLDDWVLCRIYNKKGVIEKRRSDIEDGLKPVTDTCPPESVARLISGSEQAVSPEFTCSNGRLSNALDFPFNYVDAIADNEIVSRLLGGNQMWSTTLDPLVVRQGTF

SEQ ID NO: 4325 - protein, 210 aa, Aristolochia manshuriensis
NRQVTFSKRRGGIFKKAREITVLCDAEVSLIMFSSTGKLSEYCSPSTTTKKAYDRFQEVSGINLWSSHYEKMQNHLNKLKEENSNLRREIRQRMGEDLDGLEMEELRGLEQNMDSALKVVRERKYHVVHTQCDTYRKKIRNLEDTNKRFLRALEGRDESGVFLYDDSGRPDCESAFGLDNGGPHMFGFRLQPCQPNLHDAGYSTNDLRLA

SEQ ID NO: 4326 - protein, 210 aa, Aristolochia manshuriensis
NRQVTFSKRRGGIFKKARELTVLCDAEVSLIMFSSTGKLSEYCSPSTTTKKVYDRLQEVSGINLWSSHYEKMQNHLNKLKEENSNLRREISQRMGEDLDGLEMEELRGLEQNMDSALKVVRERKYHVIHTQCDTYRKKIRNLEDTNKRFLRALEGRDETAGLLYVDSGRPVFESAFGLASGGPHMFGFRVQPCQPNLHDSGYGNDDLRLA

SEQ ID NO: 4327 - protein, 401 aa, Arabidopsis thaliana
  misc_feature (118)..(119): Xaa can be any naturally occurring amino acid
MKNDESQEEEIPDQFLCCVCLELLYKPIVLSCGHLSCFWCVHKSMNGFRESHCPICRDPYVHFPSVCQKLYFLLKKMYPLAHKKREEQVLKEEQERECFSPQIDLVLDLSVCSGDSLXXSDKQKVEECSNAANLLSSSSSRGDIPCIPKNQEPTDAKALNVHENELLKDNKVSKQISKDDLLCSACKELLVRPVVLNCGHVYCEGCVVDMAEESEKIKCQECNVCDPRGFPKVCLILEQLLEENFPEEYNSRSSKVQKTLAHNSKGNIQSYLKEGPSLSNDNNNDDPWLANPGSNVHFGAGCDSCGVYPIIGDRYRCKDCKEEIGYDLCKDCYETPSKVPGRFNQQHTPDHRLELARSPQVLINFNSIGILLGPVISNEGMDTDDGEEGPPGSSNESSSTE

SEQ ID NO: 4328 - protein, 207 aa, Brassica napus
MKREHGHRETSSVKAGSSSMTANKEEAGGFDELLVVLGYKVRSSDMADVAHKLEQLEMVLDDGNSHLSDDTVHYNPSDLSGWVDSLLFDLNPTCDQVIPDQDSEYELSAIPGSAAYPRGKRTRTGSDSSTTRSMVVLDSQETGVRLVHALLACAEAVQQNNLKLADVLVKHVGLLASSQAGAMRKVATYFAEGLARRIYRIYPRDDV

SEQ ID NO: 4329 - protein, 187 aa, Pisum sativum
MEFKATELRLGLPGITEEEEKKIIHGSSVVKNNNKRQLPQTSEESVSISKVTNDEHIVESSSAAPPAKAKIVGWPPIRSYRKNSLHEADVGGIFVKVSMDGAPYLRKIDLRVYGGYSELLKALETMFKLTIGEYSEREGYKGSEYAPTYEDKDGDWMLVGDVPWDVTSCKRLRIMKGTEAKGLGCGV

SEQ ID NO: 4330 - protein, 288 aa, Coccidioides immitis RS
MEPAQAGAAGGAGAQSAASRQRHHHHQPQDTQGQGGQQGGQQQQQPVIKGASAALSAQGYAPVPELYTGTWANVNQGLTGQARDVLTTYWQHMINHLESDNHDYKIHQLPLARIKKVMKADPEVKMISAEAPILFAKGCDIFITELTMRAWIHAEDNKRRTLQRSDIAAALAKSDMFDFLIDIVPREEATSHTKRSAPSAPPQHANAGQMPPQQPGVQQPHHMGPPDYGSLGQPPMGQEQDYRQQPAMYGGAVQSDPAYGQPQPQMFEGIDDKTRWCLWEKRRYQERE

SEQ ID NO: 4331 - protein, 227 aa, Oryza sativa (japonica cultivar-group)
MSPAAAATGLALGVGGVAGAAAVGTGQHFRGVRKRPWGRYAAEIRDPAKKSRVWLGTFDTAEEAARAYDAAAREYRGAKAKTKFPYPNGAPAAGVNSGSSNSSTVESFGSDVQAPMKAMPIPPSLELDLFHRAAAAAAAGAGGMRFPFEGYPVSHPYYFFGQAAAAAAASGCRMLKIAPAPVTVAALAQSDSDSSSIVDLAPSPPAALAKKAIAFDLDLNCPPPMEV

SEQ ID NO: 4332 - protein, 556 aa, Populus trichocarpa
MTIEESEPSHTSDHVLDWLEDSVSFVPSFFDDPYSTADTNPYQWWDQAEEFYQDLVNTNASLSSSITTSTTTNINTTSLVPPITPTLSNHPQSTTSNKKRKDPEDPVTKTSQNHHQRKNPNNWINKKQQDGEAVVVVKKSNGNKKTTNKGTGINGNNGNNKEGRWAEQLLNPCAAAIPIGNMSRVQHLLYVLHELASLTGDANHRLAAYGLRALTHHLSSSSTLSSASTGTITFASTEPKFFQKSLLKFYEVSPWFAFPHNIANASILQVLAQEQDPRRNLHVLDIGVSHGVQWPTLLEALTRRPGGPPPLVRITVITAASENDQTTETPFSIGPPGDNFSSRLLGFAKSMNINLQIKRLDNHSLQKLSGRIIDTKPDEALIVCAQFRLHHLNHNTPDERTEFLRVLRRLEPKGVILTENNMDCSCNSCGDFATGFSRRVEYLWRFLDSTSSAFKGRESVERRMMEGEAAKALTNRGEMNEGKEKWCERMRGVGFVGELFGEDAIDGARALLRKYDSNWEMRGEGKDGCVGLWWKGQPVSFCSLWKLDMKGSESKL

SEQ ID NO: 4333 - protein, 205 aa, Eucalyptus globulus
MGRGRVQLKRIENKINRQVTFSKRRCGLLKKAHEISVLCDADVALIVFSTKGKLFEYATDCCMERILERYERYSYAESQVLTNNAETNGNWTLEHAKLKARMEILQKNQKNLMGEELDSLSLKELQNLEHQLDTALKNIRSRKIQLMCESISELQRKDKALQEQNNMLAKKVKEKEKALAQQTQWDNPQDDGLTSSSGSLPSEWN

SEQ ID NO: 4334 - protein, 159 aa, Brassica napus
MAIMSDNKTRSSVQIFIVFSLCCFFYILGAWQRSGFGKGDSIALEMTNSASAADCNIVPSLNFETHHAGESSALVASTKVKTFEPCSARYTDYTPCLDQKRAMTFPRESMIYRERHCVPENEKLRCLVPAPKGYVTPFSGPKSRDYVPYANAPYKALTC

SEQ ID NO: 4335 - protein, 562 aa, Populus trichocarpa
MTIEGSEPNQASDHILDWLEDSVSFLPSFLDDPYNAADIDPYQWWEQAEEICQDLANTNTNTNTSLSSSTTTSTITNINTTSLISPNNPTISNHPPTSTSNKKRKDPEDLVPKTSQNHNQRRNLNHRINKEDQDGEAVVGEVVAVKKSNGNKKSTNKSTGNNSNNGNKKEGRWAEQLLNPCAAAITIGNLSRVQHLLYVLHELASPTGDANHRLAAHGLRALTHHLSSSSTVSSASIGTVTFASTEPKFFQKALLKFYEVSPWFAFPNNIANASILQVLGQEQDPTRILHILDIGVSHGVQWPTLLEALTRRPGGPPPLVRITVITATTENDQSTEPPFSIGPPGDNFPSRLLGFAKFMNINLEIKRLDGYPLQKLSGRIIDAKPEEALIVCAQFRLHHLNHNTPDERTEFFRVLRRLEPKGVILSENNMDCSCNSCGDFATGFSRRVQYLWRFLDSTSSAFKGRESEERRMMEGEGSKALTNRGEMNEGIDKWCERMQGVGFVGEMFGEDAIDGARALLRKYDGNWEMRTGGKDGCVGLWWKGQPVSFCSLWKLDMKGSDS

SEQ ID NO: 4336 - protein, 551 aa, Arabidopsis thaliana
MDSDDDMHDMDSVDYDYYSGGTYDDNDSDETDFGFGEADTDDAAIIASYRSKYVVLKEEDIRRHQNDDVGRVSAVLSITDVEASTLLLHYHWSVSKVNDEWFADEERVRRTVGILEGPVVTTPDGREFTCGICFDSYTLEEIVSVSCGHPFCATCWTGYISTTINDGPGCLMLKCPDPSCPAAIGRDMIDKLASKEDKEKYYRYFLRSYVEVNREMKWCPAPGCEHAIDFAGGTESYDVSCLCSHSFCWNCTEEAHRPVDCDTVGKWILKNSAESENMNWILANSKPCPKCKRPIEKNHGCMHMTCTPPCKFEFCWLCLNAWTEHGERTGGFYACNRYEAAKQEGLYDEAERRREMAKNSLERYTHYYERWASNQVSRQKAMGDLQKMQSEKLGKLSDIQCTPESQLKFIAEAWLQIIECRRVLKWTYAYGYYLQDHAKKPFFEYLQGEAESGLERLHKCVEKDIEVFELAEGPSEEFNHFRTKLTGLTSSITKTFFENLVKALENGLADVDSQAASSKPANSKPSSKTKGGGKGKGSSKNGGSSRNPDGN

SEQ ID NO: 4337 - protein, 821 aa, Arabidopsis thaliana
MSTYYYHIDSMNWLPEAEAEDDFKGLLSGDFFDDLINHLDVPLDDIDTTNGEGDWVDRFQDLEPPPMDMFPTLPSDLTSCGSGMAKAPRVDIQRNIPALVSSFYSYNLSDVNLSLSAVFITIVSSIHVEGIPNPSIILCHLLYWCIDCVPDFAIHLICLVSLVQKQSYSSEALSSTLHQSSAPPEIKVSKLFQSLSPVSVLENSYGSLSTHNNGSQRLAFPVKGMRSKRKRPTTLRLSYLFPSEPRKPEKSTPGKPESECYFSSEQHAKKKRKIHLTTRTVSSTLEASNSDGIVRKCTHCETTKTPQWREGPSGPKTLCNACGVRFRSGRLVPEYRPASSPTFIPAVHSNSHRKIIEMRRKDDEQFDSSMIRAVISRGLKTDTLVKLNDNRERLENKSFFHRDERLTYKKFQLKPSFVSLRSYKITLYKMLTLNSNFMIHFPVIVIVELFHSSVFRSSAISLFIFIACSMPFSVTCASTPTNSTSLSKKDLSEPFGIKDSVLTSGIGNVEAHYMNWLPEAEAEEHLKGILSGDFFDGLTNHLDCPLEDIDSTNGEGDWVARFQDLEPPPLDMFPALPSDLTSCPKGAARVRIPNNMIPALKQSCSSEALSGINSTPHQSSAPPDIKVSYLFQSLTPVSVLENSYGSLSTQNSGSQRLAFPVKGMRSKRRRPTTVRLSYLFPFEPRKSTPGESVTEGYYSSEQHAKKKRKIHLITHTESSTLESSKSDGIVRICTHCETITTPQWRQGPSGPKTLCNACGVRFKSGRLVPEYRPASSPTFIPSVHSNSHRKIIEMRKKDDEFDTSMIRSDIQKVKQGRKKMV

SEQ ID NO: 4338 - protein, 218 aa, Pisum sativum
MGRGGATTAAAAVEPVFFKEPRYRGVRKRPWGRFAAEIRDPLKKARVWLGTFDTAEEAARAYDTAARNLRGPKAKTNFPLAQPFYQNPEAGNPFGELRFYAGGAGEGFQDHRRPTSSGMSSTVESFGGPRPVRPPMPPSAVTGRRYPRTPPVAPGDCRSDCDSSSSVVDDADNDNAASSTMLSFKRQPLPFDLNAPPLEEGDVANGLGEDLHCTLLCL

SEQ ID NO: 4339 - protein, 373 aa, Oryza sativa (japonica cultivar-group)
MASLPPPAPPAIGGDPLAATIPPSLPSPAPSSSSLNLSPSLLIITALLAFVFFASVSIHFLLRCLARPSHPAPSPLPRASAAAQRATTASAVEAGEATAASAVGRSHEGEAAAGGGEEVDDEKERLIASLPLFTMASALAALPKSSPDCAVCLSPFAPEAELRLLPACRHAFHASCVDAWLRTTPSCPLCRATVSLPHPPLPTAAAAAASNAAQQDPLDSRSSNNSRSFRVEIGSISNRRSSAAADDRRTYSLGSFDYRVDEEVEAVVSRIARPAAAKSTTGSVTPAPGEALAEAAGSRGWLREYVDRLASSASSLSGRWSGRWSARWSQSHHSNRQEDSWRWDPEAAVMSAPRGVDDDEPGFVTLYRWIVGV

SEQ ID NO: 4340 - protein, 430 aa, Glycine max
MGRHSCCYKQKLRKGLWSPEEDEKLLNHITKHGHGCWSSVPKLAGLQRCGKSCRLRWINYLRPDLKRGAFSQQEENMIVELHAVLGNRWSQIAAQLPGRTDNEIKNLWNSCLKKKLRQRGIDPNTHKPLSEVENDKDMNMMPPSTDKSTQKASVGSNEVVSNLVDHHQPPKTMPNSSSERYPLEVSTTSSTQELFLDRFGTTPTTCHHHHNNNNTSDVVGSYFSFQHLNYGTTTSMALSSNPNTSLCFILPSTSSDINNNNSIITSSSMLPSIFPTQHVKLQSNNNNPSSISSDGVQNWETSNNTNKNNGNMQLQSSTNYLDSTWGVAESMKIVNINKEAQVVPLQAEQEDLKWSEYLNTPFILGNNTAQNHQIHTSQSIYSEVKPETGFITDESCATWHHYQNQTPAFQLSDIYSKDLQRFSVTFGQTL

SEQ ID NO: 4341 - protein, 96 aa, Glycine max
MGGKCPHRNVKKRRYSHKTARRTKFELKGDDMVYAQLNKPDQERPPLPVDEDLPGMGQYYCLHCDRYFANITVRDEHFKTKRHKKRYAAFDFASVF

SEQ ID NO: 4342 - protein, 194 aa, Triticum aestivum
  misc_feature (165)..(165): Xaa can be any naturally occurring amino acid
  misc_feature (180)..(180): Xaa can be any naturally occurring amino acid
TDLSLSLVPTATPALNKDDYFAICLAALVATDKEQQASAWNPSPAPAQELRFSCAVCGKAFASYQALGGHKSSHRKPPPTGERCIAVQASAGGGSEASAAASSGESSGGPHQCTVCGRGFKTGQALGGHKHCHYWDGTSVSMSMSVSMSASSAVLRNFDLNLLPXPEKAGVKRWAEEEEXVQSPLPTKNLRLLL

SEQ ID NO: 4343 - protein, 131 aa, Brassica napus
  misc_feature (24)..(24): Xaa can be any naturally occurring amino acid
SKWRKRQSGEKLKHRQRKGFWSPXIEDEKLSRFILSHGHSCWTTVPIKAGLQRNGKSCRLRWINYLRPGLKRDMISTEEEEIILTFHSSLCNKWSMIAKYLPGRTDNEIKNYWHSHLKKRWLKSPSISSSS

SEQ ID NO: 4344 - protein, 340 aa, Gibberella zeae PH-1
MEASALKAWELDNNVQLVDPKRDALYNFDADAQKAINKEQPWKQDPSHFKHVRISATALIKMTMHARSGGNLEVMGLMQGYTQGDTFIVTDAFRLPVEGTETRVNAQDEANEYIVEYLDLCRAQGRQENVVGWYHSHPGYGCWLSGIDVDTEAMQQQFQDPFLAVVIDPDRTINSGKVDIGAFRTYPADYKPSGGVTSDGFQAVPLAKAAEFGAHASRYYSLEVSHFKSSLDSHLLELLWHKYWVQTLSQNPLITNRDYGNKQLLDLSSKIKEATTGITRNRAGQGMMMGMSTKSSDKAVDKLAKEANLIASKERSGLIANQVKASLFNDLGSKANPTSE

SEQ ID NO: 4345 - protein, 250 aa, Oryza sativa (japonica cultivar-group)
MEPSSQPQPAIGVVAGGSQVYPAYRPAATVPTAPAVIPAGSQPAPSFPANPDQLSAQHQLVYQQAQQFHQQLQQQQQRQLQQFWAERLVDIEQTTDFKNHSLPLARIKKIMKADEDVRMISAEAPVIFAKACEIFILELTLRSWMHTEENKRRTLQKNDIAAAITRTDMYDFLVDIVPRDDLKEEGVGLPRAGLPPLGVPADSYPYGYYVPQQQVPGAGIAYGGQQGHPGYLWQDPQEQQEEPPAEQQSD

SEQ ID NO: 4346 - protein, 560 aa, Glycine max
MAEVVKSEECCQENKQSTAASCSSVSEGSGSAIHKSPGRCSPASTSPSHRRTTGPIRRAKGGWTAQEDETLRNAVAVFKGKSWKKIAEFFPDRSEVQCLHRWQKVLNPELVKGPWTQEEDDKIVELVSKYGPTKWSLIAKSLPGRIGKQCRERWHNHLNPDIKKDAWTLEEELALMNAHRIHGNKWAEIAKVLHGRTDNAIKNHWNSSLKKKLDFYLATGRLPPIPKNSPQVPVKDTIRRSASKSMLGCSNKELNAAVETSSETTAISKLDDSGRNQFESSGTVREVGDSSSVPANDSADSDCVECKPGSSNINPSCSNSEHVSRANFGTTFGPISENSGLNGNSTFEHCTNNGDRSSTRLIGTSSQENPTCGSLCYEPPQLDGSVPIDSLYLNYTCQQNEYCPSPTMSPTGFFTPPRAKGSELCTETPESILRKAANTFPNTPSILRRRRTGAQTLTSPTKVLKVDNNPHTSNKTERTNDDSGSGHFSGSPASHGYGIGIPNNKAFNASPPYRLRSKRTAIVKSVEKQLEFAFDKEKNDDKRSNVMTEDRLHEKKLVVT

SEQ ID NO: 4347 - protein, 175 aa, Brassica napus
MQVQTLEKKISNLLVTNKKIMSTDETLTDSQFQLVPANGSSSNNIREEDVKRLVENGVHDKGIQLGSKIEGIIDGKFDKGYLVTINMGPQELTGVLYHSAPSETPRRRKKKAKLCHVYSLRPKFPRSGYNFFFSEEYKRLKAANAEQEHYLAKEIGNNWRNLSPSDREVYQEKGA

SEQ ID NO: 4348 - protein, 272 aa, Zea mays
  misc_feature (158)..(158): Xaa can be any naturally occurring amino acid
MDPSAVSFDSGGTRRGGGAQMLLFGGGGSANSNGFFRGVPMAVLGMDDATRVGKRPFFTTHEELLEEEYYDEQAPEKKRRLTAEQVQLLERSFEEENKLEPERKTELARRLGMAPRQVAVWFQNRRARWKTKQLETDYDRLKAAYDALAADHQGLLAXNDNLRAQVISLTEKLQGKETYPSATTAAQEVDQPDEHTAVSGTEELLAQQLKDNLHSSGDCTGHGTLSSEEDDGGVVSDEGCSFALPDAMFAAGFTHHGAEEVQLANWTSMFWN

SEQ ID NO: 4349 - protein, 202 aa, Arabidopsis thaliana
  misc_feature (14)..(14): Xaa can be any naturally occurring amino acid
METFEESSDLDVIXQKHLFEDLMIPDGFIEDFVFDDTAFVSGLWSLEPFNPVPKLEPSSPVLDPDSYVQEILQMEAESSSSSSTTTSPEVETVSNRKKTKRFEETRHYRGVRRRPWGKFAAEIRDPAKKGSRIWLGTFESDIDAARAYDYAAFKLRGRKAVLNFPLDAGKYDAPVNSCRKRRRTDVPQPQGTTTSTSSSSSN

SEQ ID NO: 4350 - protein, 276 aa, Arabidopsis thaliana
MAKKEKIEQVISMGGIMWEEEFEKGNDKEWFIITERNKVDQGLSQTKRVGNGAKRQKRVDTNGGYWHATVAAQKINAGDGVVGNKRPLAYYDRKPSEDVKTDWLMQEYSLDHNNDKVRLHFVQDLSYSTSNKEVGEEKKKQKKGEPVEASEGQQPCNAEYHQPLAPLDSCQPQPHDLAEQLDLHQPEQLQLQQPHDIVYQPQYCLLPEQHQLQPFPDNFSELNSFQQQPVMIPDDLEDFLAELMEPHSLDGDEESNNYGFFEGLFDTEGINDKTLH

SEQ ID NO: 4351 - protein, 192 aa, Oryza sativa
MAARKLLEQPGTAAPPVLGGSIADDRDIVIILASLLCALICVLGIGLVARCACSRRGGGGPDAAAANKGVKKSVLRAIPTVEYVSPGGGGKGKEEEEAPAEEGEQSECAICLSDFEHGDAMRVLPQCGHAFHAACIDKWLRGHSSCPSCRRILVLQLPQGERCQRCGARPEPAAASAVWKPTHYSEVPPFLP

SEQ ID NO: 4352 - protein, 638 aa, Malus hupehensis
MKGEHQIHQLNQYPLPQQHPDPSMASASAGGGFGKAKMWDDESQRMDGGMDELLAVLGYKVRSSDMADVAQKLEQLEEFMGCAQEDGLSQLASDTVHYNPSDLSTWLETMISEINVPPPNFDPLMGGAVAGIQLSQQQVQLVDDPFLAPAESSITTVDFPDHRKSKSMSTSPTQNVFEDCNSSSSYYDFKSIPGNAVFTKTRLDSSSREPKRLKSSSGSSPSDLLFNRPAASSLPQPQQPISLPAPAESSSTRPALLVDSQENGVRLVHGLMACAEAVQQNNFNLAKALVTQIGYLAGSQAGAMRKVATFFAEALAHRIFRVYPQSPIDHSFSDMLQMHFYETCPYLKFAHFTANQAILESLQGKTRVHVIDFSMNQGMQWPALMQALALRPGGPPAFRLTGIGPPASDNSDHLQEVGWKLAQLAETIHVEFEYRGFVANSLADLDASMLELRPSEAESVAVNSVFELHKLLARPGAIEKVLSVVKQMKPEIVTVVEQEANHNGPVFMDRFNESLHYYSTLFDSLEGSANSRDKVMSEVYLGKQICNVVACEGVDRVERHETLAQWRARFGSADFVPVHLGSNAFKQASMLLALFAGGDGYRVEENDGCMMLAWHTRPLIATSAWKPANNSVMAHRVE

SEQ ID NO: 4353 - protein, 197 aa, Brassica napus
FFFFFWGYLYHLFSLEPRYKSKLLKINVKKKIFSFIDVTQTKYICFDGFCFFSSDPDAEVVSLSPRTLLESDRYICEICNQGFQRDQNLQMHRRRHKVPWKLLKRDNNIEVKKRVYVCPEPTCLHHDPCHALGDLVGIKKHFRRKHSNHKQWVCERCSKGYAVQSDYKAHLKTCGTRGHSYDCGRVFSRFNFLFFSQ

SEQ ID NO: 4354 - protein, 193 aa, Arabidopsis thaliana
MALEALNSPRLVEDPLRFNGVEQWTKCKKRSKRSRSDLHHNHRLTEEEYLAFCLMLLARDGGDLDSVTVEEKPSYKCGVCYKTFSSYQALGGHKASHRSLYGGGDNDKSTPSTAVKSHVCSVCGKSFATGQALGGHKRCHYDGGVSNSEGVGSTSHVSSSSHRGFDLNILPVQGFSRDDEVMSPMATKKPRLK

SEQ ID NO: 4355 - protein, 217 aa, Phalaenopsis hybrid cultivar
MGRGKIEIKRIENSTNRQVTFSKRRNGIMKKAKEISVLCDAQVSLVIFSSLGKMFEYCSPSTTLSKMLEKYQQNSGKKLWDAKHENLSAEIDRIKKENDNMQIELRFSWVLSRHLKGEDLNSLNPKELIPIEEALQNGLTSVRDKQMDYLKMLKKNERMLEDENKRLTYLLHQQQMAMEGSMRELDIGYHHKDREYAAQMPMTFRVQPIQPNLQGNK

SEQ ID NO: 4356 - protein, 354 aa, Arabidopsis thaliana
MSSAIVVSQDAESLGLQIYSRKEKSLGVLVSNFLRLYNRDDVDLIGLDDAAGQLGVERRRIYDVVNILESIGIVARRGKNQYSWKGFGEIPRSLDELKEEGMRERLGYSSSNNSDKVSNGCEREEPLTLTPDDQENSSSSKMDQKKEKSLWLLAQNFVKMFLCSDDDLITLDSAAKALLSDSPDSVHMRTKVRRLYDIANVFASMNLIEKTHIPVTRKPAYRWLGSKSIAERGLSLFNSGEPKRVFGTEITNLRAKRNKTYCSSIRKQIGYKKHDEENTEQESKPAASKYVFGPFSPIGASKTNNDKVGKGRLLEIEALASTYQPQYCNQEITGLLGHFTEAWKKWYAEVDRNK

SEQ ID NO: 4357 - protein, 314 aa, Zea mays
MTRRCSHCSHNGHNSRTCPNRGVKIFGVHLTDGSAIRKSASMGNLSLLSAGSTSGGASPADGPDLADGGGGYASDDFVQGSSSASRDRKKVFLGLEKNTGVFAGITKARERGWRGISRNFVVSRTPTQVASHAQKYFIRQSNMSRRKRRSSLFDMVPDESMDLPPLPGSQEPETSMLNQPPLPPAVEEEVESMESDTSAVAESSGASALMPESLQPTYPMIVPAYFSPFLQFSVPFWPNQEDGGDLPQETHEIVKPVAVHSQNPINVDELVGMSKLSIWEHGQETVYTSLSLNLLGGQNRQSAFHANPQTRAQA

SEQ ID NO: 4358 - protein, 293 aa, Oryza sativa (indica cultivar-group)
MAGQQPPTGGAEDDFFDHFFSIPSAAAAGAGGVGGLGSGDHHPFPLALSLDAEGAGAARRLLDGGHDGGRTDRDPVQLAGLFAPVFGAAAGVQPPHLRAPPPPQVFHAQPKPGEGAMAAPQPQQPPAPRPKVRARRGQATDPHSIAERLRRERIAERMRALQDLVPNTNKTDRAAMLDEILDYVKFLRLQVKVLSMSRLGGAGAVAQLVADIPISVKGEASDSGSKQQIWEKWSTDGTEKQVAKLMEEDIGAAMQFLQSKALCMMPISLAMAIYDTQHSQDGHSVKPEPNTPS

SEQ ID NO: 4359 - protein, 257 aa, Oryza sativa (indica cultivar-group)
MGRGKIAIKRIDNTTNRQVTFSKRRGGLMKKARELAILCDADVGLIVFSCTGRLYDFSSSRVFFDSLDDLKSGALFLKEKEMRSRSCMKSIIERYQEAGEEHCRLLNPMSEAKFWQREVTTLRQQVQNLHHNNRQLLGEEISNFTVRDLQLLQNQVEMSLHSIRNKKLMIKLVSVLTSIHCVMTEGSLVQKENSELRKKFNIAHQRNIELHKKLNSGESTSSEQVTRSSKDPGESSTPRDSRVCIDLELSQKEVEDE

SEQ ID NO: 4360 - protein, 228 aa, Arabidopsis halleri subsp. gemmifera
MRIRRREEKENQEYKKGLWTVEEDNILMDYVLNHGTGQWNRIVRKTGLKRCGKSCRLRWMNYLSPNVNKGNFTEQEEDLIIRLHKLLGNRWSLIAKRVPGRTDNQVKNYWNTHLSKKLVGDYSSAVKTTGEDDGSLPSLFITAATTSSRYHQQENVYENIAKSFDGVVSASYEDKPKQELAQNDVLMATTNDPSHYYGNNALWVHDDDFELSSFVMMNFASGDIEYCL

SEQ ID NO: 4361 - protein, 341 aa, Zea mays
  misc_feature (258)..(258): Xaa can be any naturally occurring amino acid
  misc_feature (312)..(312): Xaa can be any naturally occurring amino acid
MMAEAWTPVPFPPTAPCFWLHDTHSVFWRGGDAWTAAENKLFEKALAQIDRNAPDRWEKVAEVVRTKTVDDVRNHYHDLENDVGFIEAGLVPFPHYSGSVPSFGFTHEDWDGGFRRGYCLKRARGSDPERKKGVPWTEEEHKLFLMGLKKYGRGDWRNISRKYVTTRTPTQVASHAQKYFIRLNSGGKDKRRSSIHDITTVNLPDEDRGNAPPSAVTTTTNPSVALVDMKPFVAPSLGVPHPYGDVKLEPKSSLVAGXGLQRLRPPDALRTVVTGCSCGENRSRRNVRHQPPPHLSPGGHQGRRHKSHVVVXAWMQSCFRKLRCARLWLASPAFVCCLPSL

SEQ ID NO: 4362 - protein, 156 aa, Hevea brasiliensis
MCLSNLPASSEGVICVVVMNTALSISIFKGIVRSVLHIVDNRLAPFSSSSSSILFPDYSDTESFEFPLHSSDDCVRELRSRRPAKRFDAVSSCKQPQHDCPVCLIQFKPDSEINCLSCGHVFHKACLEKWLDYRKVTCPLCKSPVMPEEEDTSSSW

SEQ ID NO: 4363 - protein, 274 aa, Zea mays
MEQGDPTPAASACNCDPAAAPPAWIPLHDHDDTLLQQLDAILLGMDDDDVATADDRCCSGWLSSSPSPSPSSSSEATTTASPPPSTREQHRRHPAKDAPPYTALAGGGDEKRAVTTAAFIGVRKRPWGKFAAEIRDSTRKGARVWLGTFDTPEAAALAYDQAALAARGAAAVLNFPVERVVESLGALALAGAGSPVLALKRRHSKRTRRRKPSAVATTDGDGKDTMMKQPRRRQPAAAPRQCSGLPGAVPSYTTVAAVPPPPQQHATARGQSHT

SEQ ID NO: 4364 - protein, 314 aa, Oryza sativa (japonica cultivar-group)
MAQQQKKNAHVPKFGNWDNGGNVPYTVYFENARKGKPTRGSAVPRFGDWDSNPASADGYTHIFNKVREEKQTGQAAGKPAAGLGKGGAAAAGHGNAAKRYHDDDFASTVIPNIIRIMSTASTARSRKRAHDGSRQKVDVINLETTAPVVNTGSQHEALILRGTRTSPIDVEALDDKRRSRKIMRRSVAVVDPEKDTGPGGYGVAGAIFSRGRNFQGAVHVICLSPDREEGTSKPKNVAQTSTTHAKVAPKEPTFTCPVCLNKLDKPSTTNCGHIFCEKCIQAWLKAQKKCPTCRKSLGIKSFHRVYLPTPADYD

SEQ ID NO: 4365 - protein, 330 aa, Triticum aestivum
MEEVFPSNSKSKAGQMAGEAIAGAEKKPRPKPEQKVECPRCKSGNTKFCYYNNYSMSQPRYFCKACRRYWTHGGSLRNVPIGGGCRKPKRSGTSDAHKLGVASSPEPTTVVPPSTCTGMNFANVLPTFMSVGFEIPSSLSLTAFGSSSSSNTAAMMSPGGTTSFLDVLRGGAGGLLDGSLSQNNGYYYGGPAIGSGNGMLMTPPAVSFGIPVPMQQHGDLVVGGNGIGAATASIFQGATSEEGDDGMGGVMGLQWQPQVGNGGGGGGVSGGVHHLGTGNNVTMGNSNIHNNNNNDSGGDDNNGGSSRDCYWINNGGSNPWQSLLNSSSLM

SEQ ID NO: 4366 - protein, 221 aa, Zea mays
MARGKVQLRRIENPVHRQVTFCKRRAGLLKKARELSVLCDAHVGIIVFSAHGKLYDLATTGTMEELIERYRTASSREAADGCGDNNRMDPKQETMVLQQEINLLQKGLRYIYGNRTNEHMSVEELNALERYLEIWMYNIRSAKMQIMIQEIQALKSKEGMLQAANEVLQEKIVEQSSLLDVGMVVADQQNGHFSTVPLVEEMISNPLTILSGYSNCRGYSF

SEQ ID NO: 4367 - protein, 299 aa, Oryza sativa (japonica cultivar-group)
MQMESYYGAFHADEAAFFFPHHVPASPELPFGLIASPEPEPEPEQAAAEARQSAFQEYGGAVHAGAPAAAGAVTTGGTNIHRRVMDVLGRMGGGGGGGEKGEGEEMEEEEEVPQRRRRGQGADVESSRGFRHMMRERQRREKLSQSYADLYAMVSSRSKGDKNSIVQSAAIYIHELKVARDQLQRRNEELKAQIMGHDEQQPCVTVQFEVDEPSSSIDSMIAALRRLKGMSVKARGIRSSMSGNRLWTEMNVETTIAACEVEKAVEEALKEVERNQPDSDAPFPGSKGWTQTSHVQNVF

SEQ ID NO: 4368 - protein, 552 aa, Triticum monococcum
MYRVKSESDCEMMHQEDQMDSPVGDDGSSGGSPHRGGGPPLKKGPWTSAEDAILVDYVKKHGEGNWNAVQKNTGLFRCGKSCRLRWANHLRPNLKKGAFTPEEERLIIQLHSKMGNKWARMAAHLPGRTDNEIKNYWNTRIKRCQRAGLPIYPASVCNQSSNEDQQGSSDFNCGENLSSDLLNGNGLYLPDFTCDNFIANSEALSYAPQLSAVSISSLLGQSFASKNCGFMDQVNQAGMLKQSDPLLPGLSDTINGTLSSVDQFSNDSENLKKALGFDYLHEANSSSKMIAPFGGALTGSHAFLNGTFSTSRTINGPLKMELPSLQDTESDPNSWLKYTVAPAMQPTELVDPYLQSPTATPSVKSECVSPRNSGLLEELLHEAQGLKSGKNQQLSVRSSSSSVSTPCDTTVVSPEFDICQDYWEEPLNEYAPFSGNSLTGSTAPVSAASPDVFQLSKISPAQSPSLGSGEQAMEPAYEPGAGDTSSHPENFRPDALFSGNTTDSSVFNNAIAMLLGNDMNTDCKPVFGDGIVFDTSPWSNMPHACQMPEEFK

SEQ ID NO: 4369 - protein, 231 aa, Arabidopsis thaliana
MDQQDHGQSGAMNYGTNPYQTNPMSTTAATVAGGAAQPGQLAFHQIHQQQQQQQLAQQLQAFWENQFKEIEKTTDFKKHSLPLARIKKIMKADEDVRMISAEAPVVFARACEMFILELTLRSWNHTEENKRRTLQKNDIAAAVTRTDIFDFLVDIVPREDLRDEVLGSIPRGTVPEAAAAGYPYGYLPAGTAPIGNPGMVMGNPGGAYPPNPYMGQPMWQQQAPDQPDQEN

SEQ ID NO: 4370 - protein, 254 aa, Triticum aestivum
LRLAAKVSEGKAVQMNRLGGSGIGGTDVPPLQHQRREDVMGLGDPMLVTLRNNYRQRIMEHARWEVTARLYEGKRVPADWQRGLPELARRVEKVLFEKHPNKWEYYNMTNGPVEPHFEFAVTSLAQIQRQRASSTAYAHGGMIPAPGVTQGDTSNELVNTLLSLGINSSDDLSKVSNSNLAIRAPVKKEVSEEPKFSCPFCFDELVDASSTICGHIFCHKCIKFSVQAQNRCPACWRGLTMNSFHRVYLPATMD

SEQ ID NO: 4371 - protein, 238 aa, Triticum aestivum
MGHQHQMFNDPFASSMSSLEEDMFSGAGGYHHLTPSMQWPGLDNDIPSAPAANNATSSGGSGSHRKMSHNAYERDRRKQLNEQYSSLRSLLPDDDHTKKMSIPTTVSRVINYIPELQKEVDRLEKKKEELRRGSCEQGAMRQNTAPIVSATCLDDREIMVQVSLVSTMAGALPMSKCIKVLENQGLRLINSSTSAFQNRTFYSLHLQRTQRTMSKEGQTFCNELENAVKQKAGLHLHH

SEQ ID NO: 4372 - protein, 228 aa, Arabidopsis lyrata subsp. kamchatica
MRIRRREEKENQEYKKGLWTVEEDNILMDYVLNHGTGQWNRIVRKTGLKRCGKSCRLRWMNYLSPNVNKGNFTEQEEDLIIRLHKLLGNRWSLIAKRVPGRTDNQVKNYWNTHLSKKLVGDYSSAVKTTGGNDDSLPSLFITAATTSSRHHQQENVYENIAKSFDGVVSASYEDKPKQELAQNDVLMATTNDPSHYYGNNALWVHDDDFELSSLVMMNFGSGDIEYCL

SEQ ID NO: 4373 - protein, 525 aa, Oryza sativa (indica cultivar-group)
MESGYSDVDDDYFGDSDDYGDDGDYMDDDGDDYGGQVVEETEAPAMEKTYVVLTEDDVRARQEEDIAKVCEVLSLSPGAAAVLLRLYRWRAVLLQEEWFLDERRIRDAAGLLPADGGGGAVPARVNRRRLTCAICFDVFAAGGMRSAGCSHYYCVACWRGYVRAAVGDGARCLSLRCPDPSCPAAVVRELIDAVADGEDRERYGWFALRSYVEESTGMRWCPGPGCSRAVEFVGGGGDGEESSEVFCSCGHGLCWRCGEEAHRPVSCKTVAKWVEKNSSESETATWLLAHTKHCPKCRLPIEKNLGCMHMTCRPPCLHEFCWICLKPWRGHAACSRYQPNGTVVALAGANADDERRRQAKASLDRYLYHYERWDANLKSLRVALRDMESLERSELEAMASAAGVPATEMGFVTEAYEQVGEGRRVLGWAHAYGYYLDPDRDFTKRQLFEYLQEDANASLERLHGCAERERRELFAAGADDKAAVDFDKYRAYREKLAGLTRVTRQYFGNLVKAFETDLAEVSSSS

SEQ ID NO: 4374 - protein, 285 aa, Glycine max
MNPSSGQPQQMSSQSVEKKPKPHPEQALKCPRCDSTNTKFCYYNNYSLSQPRYFCKSCRRYWTKGGTLRNVPVGGGCRKKRSSSLKRAQDQTLTPNLNPLTTLPHLSYDSNDFTLAVARFQKQSSGQLGYNDRDLSTLGNPTTGSFCDILGNSGMNPSSANPSFLDAIRTGFLETQNHLQNLYCMYGNGDLGEVDNGNSGVVGVSGEMMLPYDQVIMSNATTQSVSVMKQEMCSRREQSERRVLGGFPWQINADTNIGELDSGRTIASWNSFTNSWHGFLQSPLM

SEQ ID NO: 4375 - protein, 321 aa, Eucalyptus gunnii
MGMAMGIKEKASSNPHNHKLRKGLWSPEEDEKLMRYMLTNGQGCWSDIARNAGLQRCGKSCRLRWINYLRPDLKRGAFSPQEEELIVHLHNILGNRWSQIAARLPGRTDNEIKNFWNSTLKKRLKMNSATSSSNESDLSNPQDIAAGIMPSFHAQYDVLATCMDSSPAPFPPMDNISAPNQFDPFPTLNNRCDTWEGVGFFTFPSGIAPVSMGDDSSYLNLEHAKVGLLGSEFSVPPLASSTTTTEENNYRSIGCGMDGKGENSFSNNNDSCFSNTTTASFKAEDDMSGFGNNLQAANLRIGEWDLEGLMDDLPSFPFLDF

SEQ ID NO: 4376 - protein, 430 aa, Oryza sativa (indica cultivar-group)
MASDGEDDAQSYYTDEGEDYTDEVDSNVDDDDDGESWDLEEEEVDDDDDDEEAKKKKAATAVDLTKIDRRYRNLSEEQVRARQDADTANVGELFAIPPGFAAVLLRHYKWSLVELQDRLFSDGDRAGAATGVALGGAPVSRNGLPLVCAICFDEHPAGEMRSAGCSHFYCVGCWRGYVHAAVGDGARCLSFRCPDPACSAAVVRELVDEVAGDADRARYATFLLRSYVEEGTRIKWCPGPGCTLAIEFVGGGGGEEKQDDVECKHGHGFCFRCGEEAHRPVSCETVRAWTDKNAMESETASWVLANTKHCPKCRLPIEKNRGCMHMTCRPPCLHEFCWLCLGPWSDHRSSEYYNCNVYDAAKANGEASDDKRRREQGMASLDRYMHFYERWAAHGKARQSAVDDMAGLDACAEKLSAAVAMPGKHIRSSA

SEQ ID NO: 4377 - protein, 255 aa, Eucalyptus gunnii
  misc_feature (214)..(214): Xaa can be any naturally occurring amino acid
MGRSPCCEKAHTNKGAWTKEEDDKLIAYIRAHGEGCWRSLPKAAGLLRCGKSCRLRWINYLRPDLKRGNFTEEEDEIIIKLHSLLGNKWSLIAGRLPGRTDNEIKNYWNTHIRRKLLNRGIDPATHRLINEPAQDHHDEPTISFAANSKEIKEMKNNAELNFMCNLEESADVASSARERCPDLNLELGISPPSHQLHQPEPLLRFTGRKSDLCXECNLGLKNSQNCRCSVGVIESETSVGYDFLGLKASVLDYRS

SEQ ID NO: 4378 - protein, 575 aa, Oryza sativa (japonica cultivar-group)
MAMGLAALSSFGGRWLRSGRMRRRRRSFGGVAAALGGGGWLAAAALGGGGQRAGGWRVVVVAGGGEDENERRGWIGNRPRQIGIEVSLGFSWLPSWALGPPFSTKIQFQRPHSSYAPGSTLKLQQNIVMAMYQLCHQVMPNLGNGVKTNNDLPLVSDKLLIVKGIPFCPNNSKKNDLQGISRPDGRIEIDSMTEDVKTEPDGSVPEKILKKPDKILPCPRCNSMETKFCYFNNYNVHQPRHFCRNCQRYWTAGGAMRNVPVGAGRRRNKHVSKYCQAMMTCNNTVAPGDVSDVVHHQVITHGSSLLPATLKENETPTEFISEVPPCKSSASILDIGEPNDTDLVPLASGDNKEEKSCASSVVVSSCSENLMPDNAIMKEPNNRSGCCNGVALPFPTGPALVLPWSLGWNSVALMPATQCSMQPVLGLKDGIPCPPSWPPQLMVPAPGICTPVVPIPLVPPLWSCFPGWPNGMWNAQCPGGSSSLVLGKHSREESLQEEEKTRNYLWVPKTLRIDDPAEAAKSSIWATLGIKPDDKGIFKSFQPNVAKNGTAPESPQALQANPAAFSRSQSFQETT

SEQ ID NO: 4379 - protein, 89 aa, Oryza sativa
MSSAGSRSSSRNSNMASEWSKEENKLFEQAIAYYGEGAPDLWHKVSRAMGGTKTADEVRLHFEILVDDIKLIEARRVPFPKYNTQGAWN

SEQ ID NO: 4380 - protein, 228 aa, Streptochaeta angustifolia
MGRGKIEIKRIENATNRQVTYSKRRTGIMKKAKELTVLCDAQVAIIMFSSTGKYHEFCSPSTDIKTIFDRYQQAIGTSLWIEQYETMQRTRSHLKEINRNLRTEIRQRMGEDLDGLDFHELRGLEQNVDAALKEVRHKKYHVITTQTDTFKKKVKHSSEAYRHLQQELGMREDPAFGFVDNAPGTWEAAVALGGPAGGGAADMYAFRVVPSQPNLHGMVYGSHDLRLG

SEQ ID NO: 4381 - protein, 253 aa, Oryza sativa (japonica cultivar-group)
MSGTPADGGGGGGGGGGGSGDDWFLDCGILEDLPAAACGAFPWDASPSCSNPSVEVSSYVNTTSYVLKEPGSNKRVRSGSCGRPTSKASREKIRRDKMNDRFLELGTTLEPGKPVKSDKAAILSDATRMVIQLRAEAKQLKDTNESLEDKIKELKAEKDELRDEKQKLKVEKETLEQQVKILTATPAYMPHPTLMPAPYPQAPLAPFHHAQGQAAGQKLMMPFVGYPGYPMWQFMPPSEVDTSKDSEACPPVA

SEQ ID NO: 4382 - protein, 607 aa, Oryza sativa (japonica cultivar-group)
MDTLFRLVSLQAASEQQQQQQQSASYNSRSTTSSGSRSSSHQTNASYSYYHHSSNSGGGGGGGGGYYYGGQQPPPSQYYYLEPYQEECGNAPHHQLYMDEDFSSSSSSRHFHHGARVQQQQPPASSTPTGTAPTPPLSTSSTAAGAGHGLFEAADLSFPPDLNLDFSSPASSSGGGTASSGAVGGGGGGRWASQLLLECARSVAARDSQRVQQLMWMLNELASPYGDVEQKLASYFLQGLFARLTASGPRTLRTLAAASDRNTSFDSTRRTALRFQELSPWSSFGHVAANGAILESFLEVAAAASSETQRFHILDLSNTFCTQWPTLLEALATRSADETPHLSITTVVSAAPSAPTAAVQRVMREIGQRMEKFARLMGVPFRFRAVHHSGDLAELDLDALDLREGGATTALAVNCVNSPARRGSRQGPPARRVRGVAPPAGPAGRHRRRGGGGPGGVRSRRVVGDGGRRRHGGGVPQGVRRGLALLLGVHGFARGELPQDEQREAGIGEGSRARHRRLGLVPGVGVDGAAGDGGVVGAAHAVGRVLSGGIQRGRRRRRAIAAAPVQGRVVDARGRHGRLGGRSRRLPRVEGAASGVGKRVAAMIGSS

SEQ ID NO: 4383 - protein, 218 aa, Medicago truncatula
MDCSFIPFSSKSNFFPQSSFGSQDSISLNPKNHNEFLPFNENDPEEMLLYGMITSSPQEQTLSKTSNEKTTKSNKDKNNKSYRGVRRRPWGKFAAEIRDSTRHGIRVWLGTFDSAEAAALAYDQAAFSMRGSSATLNFSVEKVKESLRDMNYLLSNDNECSPVIALKRKHSMKRKMDEKKKKHDTDVRLDNLVVFEDLGADYLEQLLMSSSDDNQNIW

SEQ ID NO: 4384 - protein, 176 aa, Panicum miliaceum
KRRNGLLKKAYELSVLCDAEVALIIFSSRGRLFEFSTSSCIYKTLERYRSCSFASEASAPPEAELNNYQEYLKLKTRIEFLQTTQRNLLGEDLGPLSIKELEQLENQIEISLKHIRSSKNQQMLDQLFELKRKEQQLQDSNKDLRRKIQEIGEENVLRLTCQDLGPTGSSGHPDDA

SEQ ID NO: 4385 - protein, 249 aa, Fragaria x ananassa
MGRGRVELKRIENKINRQVTFAKRRNGLLKKAYELSILCDAEVALIIFSNRGKLYEFCSSSSMLKTLERYQKCSYGAMEVQKPAKELEESSYREYLKLKTRCESLQQTQRNLLGEDLGPLNTKELEQLERQLESSLKHVRSTKTQHMIDLLSDLQSKEHMLIEANRDLKTKLDEIDSRTQLRQTWEHGHDHQTMLYGTQHAQTQGLMFQPLDCNPTLQIGYNAVVSQEMPAATPAHAQPVNGFIPGWML

SEQ ID NO: 4386 - protein, 231 aa, Zea mays
MMNCAGGGDPVEDFLISGAVDDEDLAIFCDGGLGIEGVNGDACGFEQSNLGKRSRDEPCSSGLKSKACREKMRRDKLNDRFLELSSVMNPGKQAKLDKANILSDAARMVAQLRGEAEKLKESNEKLRENIKDLKEEKNELREEKVRLKVEKDRLEQQVKAMSVAPTGYVPHLPHPASYHPAAFAPFVPPQQAAGNKSAPIPAPFPGMAMWQWLPPTIVDTTQDPKLWPPNA

SEQ ID NO: 4387 - protein, 567 aa, Arabidopsis thaliana
MEADDDFYSGTENYSDYADSDEDDADGEYEFVDDAADDSDDLIFRRRQQNYSVLSEADICKLQEDDISRISTVLSISRNSSAILLRHYNWCVSRVHDEWFADEEKVRDAVGLLEKPVVDFPTDGELDCGICFETFLSDKLHAAACGHPFCDSCWEGYITTAINDGPGCLTLRCPDPSCRAAVGQDMINLLAPDKDKQKYTSYFVRSYVEDNRKTKWCPAPGCDYAVNFVVGSGNYDVNCRCCYSFCWNCAEEAHRPVDCDTVSKWVLKNSAESENMNWILANSKPCPKCKRPIEKNQGCMHITCTPPCKFEFCWLCLGAWTEHGEKTGGFYACNRYEAAKQDGIYDETEKRREMAKNSLERYTHYYERWATNQSSRQKALLDLKKMQTDDIEKLSDIQCQPESQLKFIIEAWLQIVECRRVLKWTYAYGFYIPDQEHGKRVFFEYLQGEAESGLERLHQCAEKELLPYLDAKGPSEDFNEFRTKLAGLTSVTKNYFENLVRALENGLSDVNSHDAYDRTSSSKSLGGKTKGSSSKASSSDSSHWPCEYCTYVNPRSTTICQMCEHGR

SEQ ID NO: 4388 - protein, 312 aa, Glycine max
  misc_feature (199)..(199): Xaa can be any naturally occurring amino acid
MMGLDQDASSNSGLQLILGLALTATTTTTPSSPPSISNKLDHVDHHHHLITLRPTTKSSYNSSEAEPSLTLGLSRESYLKVPKSIIGHNNNKVSSCDDPLDLSTQTNSPHHSAVSSFSSGRVKRERDLSCEEVVDAKEIDQRDLSCEGIIRATEEEEDGAATRKKLRLTKEQSALLEESFKQHSTLNPKQKQALSKQLXNLRPRQVEVWFQNRRARTKLKQTEVDCEFLKKCCETLTDENRRLQKELQELKALKLAQPLYMPMPAATLAMCPSCERLGGSAVNGAGGSPKTSFSMAPKPHFFNPFANPSAAC

SEQ ID NO: 4389 - protein, 217 aa, Oryza sativa
MSCGGAGQSGWLLEYGLVEEEIQGSDFIYMVDDPAAVSSVLLGFDVPRKEDGSGGQDNSASKKRFNELSAILEPGKPPRADKVSILSDAARLLSQLRAEAQKLKSSNESLQDSIKSLKAEKSELRDEKTRLKAERERLEQMLKGVGAATPAAPAPFVPHHAAAVAAAPAYHPAAFAQAGGKYVPYATSYAPPAAFWQWIPPTSLDTSKDPVMWPPVA

SEQ ID NO: 4390 - protein, 455 aa, Oryza sativa (japonica cultivar-group)
MAAESSAAAAAGGGERRGPMDLNLYLGLPPLPPPPGRLDVAADYPSLLLNSAATVANEQRGSVVVAAPPPAAAAYSPSNALSAPEQVLVDPVAAWLVDPGEQQPVPPLETPSYMARASSTLPQIFACAALEMLVQTGGAIPPTGLIRGAEIAAASRPMTPENRLRRLIQVSDQHGVGNGRAGTGPVSRSRRANSPEADNLARAIQRSHNSLEASRRQMLDGDGSDATKKDDGCGCNGSFECNICFESAKDPVVTPCGHLFCWPCIYQWLHGHSEHSDCPVCKGEVLEVNVTPIYGRGGGEENSSRNDIQIPPRPSAQRTESLRQQLQRPDTRGGIANMVRRLMQNQDIVVGQAASSAPRPRGRGRRQARQDAPSAPATQQQVVNADAGSGNQAPLPPPDANGAAPAAAVAPQQSSSVEQASTSSTVGVIAGGPAQGRRSRVSESTPARRTRRRHQ

SEQ ID NO: 4391 - protein, 251 aa, Zea mays
MGRGPVQLRRIENKINRQVTFSKRRNGLLKKAHEISVLCDAEVALIVFSTKGKLYEYSSHSSMEGILERYQRYSFEERAVLNPSIEDQANWGDEYVRLKSKLDALQKSQRQLLGEQLSSLTIKELQQLEQQLDSSLKHIRSRKNQLMFDSISALQKKEKALTDQNGVLQKFMEAEKEKNKALMNAQLREQQNGASTSSPSLSPPIVPDSMPTLNIGPCQHRGAAESESEPSPAPAQANRGNLPPWMLRTVK

SEQ ID NO: 4392 - protein, 314 aa, Larrea tridentata
MAYPSWVDTSLDLNLNPLRASNEASPMKQEMEINFMQLGIETPVKQEMQAAELVKELNRVSAENKKLTHMLTGMCESYNTLKCQLEEYMSKSPEKESSPSKKRKSESGDNSGNVIGNGGNSESSTSDEESCKKPKEEAIKVKTSKIYVRTDKDDKSLLVKDGYQWRKYGQKVTRDNPCPRAYFKCSFAPSCPVKKKVQRSAEDQSLLIATYEGEHNHPQPSQIDVTSSSSRPVALSPLPGSACTGSSAVTATVELTKSKSCQNTIFRPKVETPDFKDYLVEQMAFSLTKDPNFTGAFAAAISGRINNQRPGGNW

SEQ ID NO: 4393 - protein, 388 aa, Arabidopsis thaliana
METKQSIPLLMPYKMGPFNLSHRVVLAPLTRSRSYGNIPQPNAKLYYTQRTTPGGLLISESCVVSETSLGYPDLPGLWNRDQVEAWKPIVDAVHSKGGIFFCQIWHGGRVFHQDQPNGEAPVSSTDKPLMCKNMYGGQFKPPRRLRSDELPAIVNDFRIAARNAIEAGFDGVEVHGAHGYLIDQFLKDKVNDRSDQYGGSLENRCRFALEVIEAVVNEIGSDRVGIRLSPFADYMESGDSNPEALGLYLVQAMNKRLFEETRDEEESTPPTKTQIVGWPPVRSSRKNNNSVSYVKVSMDGAPYLRKIDLKTYKNYPELLKALENMFKVMIGEYCEREGYKGSGFVPTYEDKDGDWMLVGDVPWDMFSSSCKRLRIMKGSDAPALDSSL

SEQ ID NO: 4394 - protein, 340 aa, Medicago truncatula
MEQATVGLSGSIHDDSVQFDEEIQGIMIPAPAPENASSFTALLELPPTLAVELLHLPEQKPYLPNSSNGNLTFPTNAALIERAAKFSVFAGENSSPGDSRLFPVESVKNEPQETDSNPCSTQECVSDPAENKNQRNVKRKEREKKGKASSSKKSKSIADETSGAGEKLPYVHVRVRRGQATDSHSLAERARREKINARMKLLQELVPGCEKISGTALVLDEIINHVQTLQRQVEILSMKLAAVNPRIDFNLDRLLAADGSSLMDSNLPSTMVTPLVWPEMPLNSNRQHYQQQWQFDAFHQPLWGREEDNHNFTTPENSLLSYNSSANSASLHSNQLKMEL

SEQ ID NO: 4395 - protein, 364 aa, Glycine max
  misc_feature (240)..(240): Xaa can be any naturally occurring amino acid
TAARRRQKGEPIIISLSPCSSRQNPFFRVTAVRVRVRVSPHILYLPIFFYYFPLVPSLSLFICKLFALGFPLQSLVLEARSFFRISIYGYPQEGKTRTRLQLKWRIQEIQASTAGCPFGEGCHFLHYVPGGYNAVAHMMNLTPAAPPPPSRNVAALPHVPNGSAPSAVKTRICNKFNTAEGCKFGDKCHFAHGEWELGKHIAPSFDDHRAMGPPGAGRLAGRMEPPPGPAARFGANATAXKISGEASLAGAIIGKGGVNSKQICRQTGAKLSIREHESDPNLRNIELEGSFEQIKEASNMVKDLLLTLQMSAPPKTTPGVPGAPASHGSNFKTKLCENFTKGSCTFGDRCHFAHGAAELRKSGV

SEQ ID NO: 4396 - protein, 329 aa, Triticum aestivum
MGMPAVRRRERDAEAELNLPPGFRFHPTDDELVEHYLCRKAAGQRLPVPIIAEVDLYRFDPWALPDRALFGTREWYFFTPRDRKYPNGSRPNRAAGNGYWKATGADKPVAPRGGRTMGIKKALVFYAGKAPKGVKTDWIMHEYRLADAGRAAASKKGSLRLDDWVLCRLYNKKNEWEKMQLQQQGEEETMMEPKAENTASDMVVTSHSHSQSQSHSHSWGEARTPESEIVDNDPSLFQQATAAAFQAQSPAAAAAHQEMMATLMVPKKEAADEAGRNDLFVDLSYDDIQSMYNGLDMMPPGDDLLYSSLFASPRVRGSQPSAGGMPAPF

SEQ ID NO: 4397 - protein, 188 aa, Oryza sativa
  misc_feature (151)..(151): Xaa can be any naturally occurring amino acid
MDGGGDPVDEFLIGGGGEDGDLGVFCDGVPTLPCDGGLGIDDVSGDTCCLDQSVLGKRGRDESSSSGPKSKACREKIRRDRLNDRFLELSSVINPDKQAKLDKANILSDAARLLAELRGEAEKLKESNEKLRETIKDLKVEKNELRDEKVXLKAEKERLQPQVKHRVLVLRRWSLIRYQVNLSADSSI

SEQ ID NO: 4398 - protein, 88 aa, Triticum aestivum
MSSGSSSRSTSPSSDSEWSKKENKMFEEALAYYGEGAPNLWEKVASAMGGTKSAEEVRRHFQILIDDVNSIEHGRIPFPKYKTQGFWT

SEQ ID NO: 4399 - protein, 351 aa, Oryza sativa (japonica cultivar-group)
MASNGAAAGAMAPFFPPNFLLQMQQPLPLHHQHLQDHAHGGHGGHHLLPPPPPSLSPFLPDLAMDAPPPPMYEASGGDGGGGGAASEDEEDGCGGGGGGGGGEKKRRLSVEQVRTLERSFESGNKLEPERKAQLARALGLQPRQVAIWFQNRRARWKTKQLEKDFDALRRQLDAARAENDALLSLNSKLHAEIVALKGGAAAAGGGGSSCRQEAASELINLNVKETEASCSNRSENSSEINLDISRPAPPPPPPPANESPVNRGIPFYASIGRGGAGGVDIDQLLLRGGHSPSPAAVTTPPPPKMELGITGNGGGADAAAAGAGSFGGLLCGAVDEQPPFWPWADGHHHFH

SEQ ID NO: 4400 - protein, 121 aa, Triticum aestivum
PNHFPSVVGAVRMKKAAGGGAVKARRKVREPRFCFKTMSDVDVLDDGYKWRKYGQKVVKNTQHPRSYYRCTQDKCRVKKRVERLAEDPRMVITTYEGRHVHSPSRDDDDAARASAEMSFIW

SEQ ID NO: 4401 - protein, 548 aa, Gossypium hirsutum
MKRDHQEISGSGSNPAESSSIKGKLWEEDPDAGGMDDELLAVLGYKVRSSDMADVAQKLEMLEKVMGTAQEDGISQLGDTVHFNPSDLSGWVQNLLIEFNGSTTTPDPNFNDDSEYDLRAIPGVTAYPPVKSDPGLENTRKRAKTESSSSSSSTTTRPVVLIDSQETGVRLVHTLMACAEAVQQDNLKLADALVKHIGLLASSQTGAMRKVATYFAEALARRIYRIFPPDSLDPSYNDKLQMHFYETCPYLKFAHFTANQAILETFSMANRVHVIDFGLKQGMQWPALMQALALRPGGPPAFRLTGIGPPQPDDTDALQQVGWKLAELAERIGIEFEFPGFVANSLADLEPEMLDIRPPEIEVVAVNAVFELHPLLARPGGIEKVVSSIKAMKPKIVTVVEQEANHNGPVFLDRFTEALHYYSTLFDSLEGSGVAPPSQDLAMSELYLGRQICNVVACEGMDRVERHEPLTQWRTRMETAGFSPVHLGSNAYKQASMLLALFASGDGYRVEENNGCLMLGWHTRPLIATSAWRLAGTESGSELTQELS

SEQ ID NO: 4402 - protein, 252 aa, Brassica napus
  misc_feature (195)..(195): Xaa can be any naturally occurring amino acid
MDTRKRAGSFNSNGGGGGGGSKKSKQEMESYSTGLGSKSKPCTKFFSTSGCPFGDNCHFLHYVPGGYNAVAQLTNMALPMPQASRNMQGPGGGGGGRFSGRGGESGPGHVSSFGASATAKISVDASLAGAIIGKGGVSSKQICRQTGAKLSIQDHERDPNLKNIELEGTFEQINEASVMVRELIGRLNSAASRRXPGGGGGIGGGVGSEGKPHPGSNFKTKMCERFAKGNCTFGDRCHFAHGEAELRRSGIA

SEQ ID NO: 4403 - protein, 311 aa, Zea mays
  misc_feature (164)..(164): Xaa can be any naturally occurring amino acid
MAMVASQGGGRRDAEAELNLPPGFRFHPTDEELVVHYLCRKVACQQLPVPIIAEVDLYKFDPWDLPEKALFGRKEWYFFTPRDRKYPNGSRPNRAAGRGYWKATGADKPIAPKGGGGAAGIKKALVFYSGKAPRGFKTDWIMHEYRLADADRAPGKKGSRKSCXLDEWVLCRLYNKKNNWEKVKAEEPEAAAPLRNQQGAAEDSMSDSFQTHDSDIDNNAFGMQNGFGNMVHGQAMTMRNGIGSVARTVKEDSYWFTDLNLDDLQAPYNVTHVLNPNPVQTMNLAAGQGHGYLQSMSSPSTKMWQTILPPF

SEQ ID NO: 4404 - protein, 651 aa, Ostreococcus tauri
MSQDPRDRPSGPPYLHPGMMGMPFPVGAPAMTPEQFQEQYGATLRRHQAQIAHAVAMNAAASANPAYAAQQAKLREFWREQMMEIQATHDFKNHLLPLARIKKIMKSDEDVRMISSEAPVLFAKACEMFVLELTMRAWAHAQENKRRTLQRGDIAAAITKTDIFDFLIDIVPRDEAGEGGGDDGENEGPSAPHSCRPYRAFPGHPRVLDTPSIFPRPRRSKPLRATRRLHRPSRTTSPKVARPRGAPFPSTHHITSPEVVSFSEDDVEITRLSMLAKTRPRRVSVGQTLLGLDQALPRSPRSPRPLSSRVRVGATLSKGSFDFDVTMATMTLSLRRFAAHSAAARAPGTKRSRTVVRGVVRGTHGRKRWTIVAKADGEPASVSASCSIDDPASCSLADLELMYVDALWNYYNGGKFTLTDEQYDRLREELNWQGSGFPTLRRYEIEFVQAAISYSRGEAVVDDAKYEELKRKVKAAGKRTDVTALLLYAKGKELLDEAEFELLSGEMKKLGIDVGMRGATCTLSQTSAELSNDPASVASMYSALAIAPFAVGLAPSILLGFVGVHLPASLSLGFALTVCAALTYKLVVYTNLQNAEILLGACPCCEMPIKQFFGGEAPLEKFEHKCSACGTVCTLNRPQRLIETAGGLGRA

SEQ ID NO: 4405 - protein, 323 aa, Arabidopsis thaliana
MAVELMTRNYISGVGADSFAVQEAAASGLKSIENFIGLMSRDSFNSDQPSSSSASASASASASASAAADLESARNTTADAAVSKFKRVISLLDRTRTGHARFRRAPVHVISPVLLQEEPKTTPFQSPLPPPPQMIRKGSFSSSMKTIDFSSLSSVTTESDNQKKIHHHQRPSETAPFASQTQSLSTTVSSFSKSTKRKCNSENLLTGKCASASSSGRCHCSKKRKIKQRRIIRVPAISAKMSDVPPDDYSWRKYGQKPIKGSPHPRGYYKCSSVRGCPARKHVERAADDSSMLIVTYEGDHNHSLSAADLAGAAVADLILESS

SEQ ID NO: 4406 - protein, 311 aa, Debaryomyces hansenii CBS767
MKTQSNKLAANKETAPESEEQKFKQKCKELKKRITEVEESNEVATLALSRSKMAIRRLRLEYAVLLERLEQRAIMIPDGNTELEDMSPPPSPTILDESLNTTNAKLTRNGLSKRGGKKAKGVSNTTGNSGSNNSRTQRIRDPDLPKRPTNAYLIFCEMEKERIKHELEERNPGAVTELSKSLTEAWKNLDDEKRKPYYKLYEEDRDRYQREMSVYNQKKQIEEEQKETKKSNKKQKLDNEPSIDENSSLTKEEQEQDDNKIENTNNNSFAIDEQNIVEENEEDSAQPNSTDNMHIDQVGNTDESLMNKDED

SEQ ID NO: 4407 - protein, 272 aa, Oryza rufipogon
MGRRACCAKEGMKRGAWTSKEDDVLASYIKSHGEGKWREVPQRAGLRRCGKSCRLRWLNYLRPNIKRGNIDDDEEELIVRLHTLLGNRWSLIAGRLPGRTDNEIKNYWNSTLSRKIGTAATAAAGSRGGSTPDTARATDAASSSSVVPPGQQQQPASRADTDTATAAAAAAATTTTVWAPKAVRCTRGFFFHDRETAPLAAAAPAPAGELGDGDDVDCDYYCSGSSSAATTTSLSSLPAVVEPCFSAGDDWMDDVRALASFLDTDDAWNLCA

SEQ ID NO: 4408 - protein, 511 aa, Aspergillus oryzae
MESDDDFMSVASSGDDFLDTQASDDESLGEDFGDDFDGGFSKDKDIVATSRKPYEVEFKVLSPDDIDRDQNQQINEVSSILSLPPESSAILLRYGRWNREKLIEGYMDHPEETLEEAGLGTNFEGTPKTEVIPGFVCDICCEDGDNLETYAMRCGHRFCVDCYRHYLAQKIRGEGEAARIECPGDGCNMIVDSKSLSLLVTPALKDRYYTLLQRTYVDDKENLKWCPAPNCEYAVDCSVKQRDLRRIVPTVQCNCKHHFCFGCTLNDHQPAPCQLVKMWLKKCEDDSETANWISANTKECPRCHSTIEKNGGCNHMTCRKCKHEFCWMCMGLWSEHGTSWYNCNRYEEKSGSEARTAQAKSRASLERYLHYYNRYANHEQSAKLDKDLYLKTEKKMTSLQSQSGLSWIEVQFLDTASQALQQCRQTLKWTYAFAYYLARNNLTEIFEDNQKDLELAVENLSEMFEKPVPELANLKVDILDKTAYCNKRRVILLSDTAENLKNGEWSFNVEW

SEQ ID NO: 4409 - protein, 298 aa, Zea mays
AWWRPACLRGSGSTRATTSSCWTTWPRSSAAAEAPVVVSIYGCPTMVDVDLNKCEPWDLPDIACIGGKEWYFYSLRDRKYATGQRTNRATDSGYWKATGKDRPISRKGLLVGMRKTLVFYQGRAPKGKKTEWVMHEFRMEGRDDPMKLPFKEDWVLCRVFYKSRATVAKPPTESSSFNIDAATTSLPPLIDNNFNISFDQPGSSSVQNLEGYEQVPCFSSNPSQQPSSSMNAARLPPSAAMADPEQQMGKSIIKDVLMSQFSRFEGSVKREAPPSNFSQDGFEYLAESGFTQMWNSFN

SEQ ID NO: 4410 - protein, 272 aa, Oryza rufipogon
MGRRACCAKEGMKRGAWTSKEDDVLASYIKSHGEGKWREVPQRAGLRRCGKSCRLRWLNYLRPNIKRGNIDDDEEELIVRLHTLLGNRWSLIAGRLPGRTDNEIKNYWNSTLSRKIGTAATAAAGSRGGSTPDTARATDAASSSSVVPPGQQQQPASRADTDTATAAAAAAATTTTVWAPKAVRCTRGFFFHDRETAPLAAAAPAPAGELGDGDDVDCDYYCSGSSSAATTTSSSSLPAVVEPCFSAGDDWMDDVRALATFLDTDDAWNLCA

SEQ ID NO: 4411 - protein, 277 aa, Gibberella zeae PH-1
MDPQNSQAAQQSRQRPVYDPSQGGHYGASAQLASQGFAPSELYTGPWANAHQGLTGQYKDILTTYWQHTISHLENDTHDYKIHQLPLARIKKVMKADPEVKMISAEAPILFAKGCDIFITELTMRAWIHAEENKRRTLQRSDIASALAKSDMFDFLIDIVPREEASSHAKRATQTAAAQPLPAGQAQMPGQHPMAQAPNPGHPMGAEYMPSHGIAPEQDYRNPANMYPDQSVPNPQAAYGQAQQPNMNPYGAMGDMYPYPGMAPQQTTMSNEEFGEQ

SEQ ID NO: 4412 - protein, 590 aa, Triticum aestivum
  misc_feature (271)..(271): Xaa can be any naturally occurring amino acid
  misc_feature (325)..(325): Xaa can be any naturally occurring amino acid
  misc_feature (404)..(404): Xaa can be any naturally occurring amino acid
MDSEDDTRDSADEDFYSGGEAGLALSDDGDADYDFADRDSDDSDDLISHRQQQNYSVLSETDIKQHQADDMNRVSTVLSISKSEACALLRSYNWSVSKVHDEWFVDEARVRTAVGLPEKQNEMPNERELTCGICFESCPRESMGAASCGHPFCGVCWRGYISTAINDGPGCLMLRCPDPSCSAAVGQDMVNLFASDEDKGKYERYLCRSYIEDNRKTKWCPAPGCEYAVEFVVGSGSYDVSCGCSYGFCWNCTEEAHRPVDWSPVPQWVLXKNSADPENLGWILANPKPCPKCKRPIEKNQGCMHITCTPPCKFEFCWLCLGPWXSDHGERTGGFYACNRYEAARQEGAFDDSERRREMAKNSLERYTHYYERWAANQSSRQKALGDLQSLQNDKLEKLSDIQXSQPESQLKFIIEAWLQIVECRRVLKWTYAYGYYLPDHEHAKRQFFEYVQGEAESGLERLHQCAEKELQIYLDADCPSKDFNDFRTKLAGLTSVTRNYFENLVRALESGLNDVGAHSGQGACSKAVSSKNLGGKSKSGKNKAPVGASKSGSSTRGMDDGNIWACDQCTFANPRSARSCQVCDHQQHR

SEQ ID NO: 4413 - protein, 299 aa, Triticum aestivum
MDAGRKRAVPEGTNGGAAVKRARESESVQTGVGSKSKPCTKFFSTAGCPFGSSCHFLHNFPGGHQAVSKMTNLGGPAVSAPQGRMPMGPGVPDGPPTPSLKTRLCNKFNTAEGCKWGNKCHFAHGERELGKPMLLNNSMAPPMGPRPNGHFQPPPMPGPDMVPPSTFGASATAKISVDASLAGAIIGKGGVNTKHISRMTGAKLAIRDNEADPNHKNIELEGSFDQVNHASAMVKELILRIGGNAPPQAKNPGRGPAGGGGGSNFKTKLCDNFTKGSCTFGDRCHFAHGESELRKSAAA

SEQ ID NO: 4414 - protein, 623 aa, Arabidopsis thaliana
MAIQTQLPCDGDGVCMRCQVNPPSEETLTCGTCVTPWHVSCLLPESLASSTGDWECPDCSGVVVPSAAPGTGISGPESSGSVLVTAIRAIQADVTLTEAEKAKKRQRLMSGGGDDGVDDEEKKKLEIFCSICIQLPERPVTTPCGHNFCLKCFEKWAVGQGKLTCMICRSKIPRHVAKNPRINLALVSAIRLANVTKCSGEATAAKVHHIIRNQDRPDKAFTTERAVKTGKANAASGKFFVTIPRDHFGPIPAANDVTRNQGVLVGESWEDRQECRQWGVHFPHVAGIAGQAAVGAQSVALSGGYDDDEDHGEWFLYTGSGGRDLSGNKRVNKIQSSDQAFKNMNEALRLSCKMGYPVRVVRSWKEKRSAYAPAEGVRYDGVYRIEKCWSNVGVQGLHKMCRYLFVRCDNEPAPWTSDEHGDRPRPLPDVPELENATDLFVRKESPSWGFDEAEGRWKWMKSPPVSRMALDTEERKKNKRAKKGNNAMKARLLKEFSCQICRKVLSLPVTTPCAHNFCKACLEAKFAGITQLRDRSNGVRKLRAKKNIMTCPCCTTDLSEFLQNPQVNREMMEIIENFKKSEEEAEVAESSNISEEEGEEESEPPTKKIKMDKNSVGGTSLSA

SEQ ID NO: 4415 - protein, 368 aa, Brassica napus
  misc_feature (76)..(76): Xaa can be any naturally occurring amino acid
MSKSKDTEIKLFGTTITSLLAVDHHDPSSLSSIHGVSNQSKEASSSSSSSCSPSTGPNMVLANNHEHDNSRFKGPXILSDLNEPPRAAFEISSPRSSKTNGDQQSEITTTTTSTSEDKPTTLKKPDKLLPCPRCESANTKFCYYNNYNVSQPRHFCRNCQRYWTAGGSMRNVPVGSGRRKNRGWPSSNHYLQVTSDDYENNNNSGTILSFGSSESSVIETGKHQENKTHQGFLASQVMLPNKCRPTRPQWSPTGPNTSFYPIPFYWGCTVPIWPISETSPCLGKRARDQTEVETKNTTLRTSEATKNVVYPELPTKPEKNTEGGLSLFNRFETKGSNRRSLVPETSINLQENPAAMSRSMNFRESMQQ

SEQ ID NO: 4416 - protein, 200 aa, Platanus occidentalis
GGITKKAQELSVLCDAEVSLIMFSSTGKFHEYISPTTTTKKIFDRYQQISRIDLWQPHYEKMQNNLNKLKEVNNNLRREIRQRMGEDLNDLSIEELRGLEQNLDDSLNIVREQKYHKIQTQTDTCKKKLKNSQETHRELLRHFEVRDEDLDYGLGDNEEDYESELGVANVGSHSFAYRLQPIQLNIQDGGIYGFRDLRLA

SEQ ID NO: 4417 - protein, 244 aa, Musa acuminata
MGRGRVELKRIENKINRQVTFAKRRNGLLKKAYELSVLCDAEVALIVFSNRGKLYEFCSSSSMLRTLERYQKCNYGAPETNIISRETQSSQQEYLKLKARVDGLQRSQRNLLGEDLGPLNIKELEQLERQLDASLRQIRSTRTQYMLDQLGDLQRLGTNAMWSLIKPWKIRLEESSEADQQQLWDPNTHAVAYGRQQPQPQGDGFFQFIDCEPTLQIGYHPDQMAIAAAAAAAPGPSYMPGWLA

SEQ ID NO: 4418 - protein, 371 aa, Oryza sativa (japonica cultivar-group)
MSSSAVIPPPSPERRVPMVAVPVVADDGGGGHGAKGEESVSGSVAGISPSILIIAVIVVVMLLASVSIHYFIRHLCRRSSASAAASSSAPVLPVVVRPASSAAVGEQVVGKASAERAAEMERLISRLPLFTLASSLAALPKSSRDCAVCQSAFRDDDELRLLPACRHAFHSRCVDPWLRANPSCPLCRASIALPHPPLPDLLRVELGSVSSRRSNPNSAAAVASAPPEGAAVRAYPLPTLPNSEYLVEEELEVVIKQPAAAAAPRTGEPSQHPLPAAQAERGQPSSVTPTASFSSARSQERWSNRWSSRWSSRWSSGRWSSRYDAGTVTAAATAEWWWDMDGGAAPAARRREVEEQGNAFHGFMRWLTGAY

SEQ ID NO: 4419 - protein, 342 aa, Glycine max
MNVTNKPNPDGSTNGFQSQLQVQQQNGWEQGSSRLRPTKPYPAPTARYQDIVRDANLFWGTLQAFHKILGTKYKVATVGGTSLDLHRLFVEVTSRGGIEKVIVDRKWKEVILTFNFKDTITSASFVVRKSYLSMLYHYEQVYYFGRQGIPPPTPDLMIRGQSGQPYSSTTIPEVAAVNDSPVQSTPVQAHDDMVSGTIDAKFDGGYVVTVILGSEQLKGVLFHVPDNVSQSSHAEGTSSSQNLGDGTSNSQSRKRAKYAPRDPFRPKSNRSGYNFFFAENYARLKPSYHGQERAISKRIGFLWNNLSEAERQVYQEKGMRDKERYRTELMEYKSNNSTPNAQ

SEQ ID NO: 4420 - protein, 233 aa, Daucus carota
MGRAPCCEKMGLKKGPWSSEEDQILISFIQQNGHGNWRALPKLAGLLRCGKSCRLRWINYLRPDIKRGNFSKEEEETIIELHQKLGNKWAAIAAKLPGRTDNEIKNVWHTHLKKKLKNYDQVKNESNVKMQVESENRRNSPQHSTSELSSVTDSSAKAKCVIKSEQNTELSESSKIPEIDASFWSEEFTINNQDKGVPGIIEEFQESGNVDAEMDFWCNLFSGAEDFKDLPEF

SEQ ID NO: 4421 - protein, 445 aa, Oryza sativa
GMLVQDPTRRNTVDSIFEQARQMGALQDQPPPFEDQSSSSRSFTGTGRLLSGETAPAAPPPPGNVLHNIQFWNNGFTVDDGPLRDYDDPANADFIESIKKSQCPQELEPADRRTPVHVNVIKRLEDYQAPLRPPSPFQGVGRTLGGGSSAEESQAPAPATQEPRRSVGIVVDDSLPFTSIQLRLADGTRMVARFNMHHTVGDIRSFIDASRPGATRPYQLQTGFPPKQLADPAQTVEQAGLANSVIIQKIYCTGIHSASNQTAGFIDRQTITIAMSAARELTAAADPCSPADDLRRARVAVELSPTPSVSLLERAHEVLDGGSVRCLMLVSARDELAPLLRLAREKGVRSVVVGGESGPARWADVGFSWAEVIAGKARKAAPSVSGKWRDRDVLKRLEWRYDDDDEEVVFEEDGDEDGIDELTRNSKGKPWWKLESDGEDSSACR

SEQ ID NO: 4422 - protein, 324 aa, Zea mays
MSSQTGGGKESDAGPGQHRQMQSLARQGSLYNLTLDEVQNHLGEPLLSMNFDELLKSVFPDGVDSDGAVTGKPDRTSSLQRQGSILMPPQLSKKTVDEVWKGIQGGPETSTVVDGLQRRERHPTLGEMTLEDFLVKAGVVTEGLVKDSADFPSNMDTAGSSVVVAAASSLNPGAQWLQQYQQQVLGSQQLSLAGSYMASQLRPQPLSIATGATLDSIYSDDQITSPSFGALSDPQTPGRKRGALGEVVDKVVERRQKRMIKNRESAARSRARKQAYTNELENKVFRLEEENKRLKKQQELDEILSSAPPPEPKYQLRRTGSAAF

SEQ ID NO: 4423 - protein, 600 aa, Oryza sativa
GGRSMGAMPAVKVEEEEEERNPVASSPSVSEGSAHAAALASPTAADSIFGRRRKSGPVRRAKGGWTPEEDEKLRKAVDIYNGKNWKKIAESFSDRTEVQCLHRWQKVLDPELIKGPWTQEEDDVIINMVKKHGPKKWSVIARSLNGRIGKQCRERWHNHLDPQIRKEAWTVEEERVLARAHCMYGNKWAEIAKLLPGRTDNSIKNHWNSSLRKKIDDYNTRDILPVHPPVVGDGLKQLPKRPPADNHFDLNKEPIICSRDRLGVVHSDPTSHQRASNLKDFKGCADYLSLGQPVTSCEASAADDSAFDLATQGMRMDSVHDKGTGNNFVCGKVQGINFLGDKGLKINQISDKMGCSRQAKREGEAAINGGGSSLQSEAHSVGSLCYQISKMEDIAPAQSPVFTANYVPEHSRNVMHSPNGYTTPPTHGKGSDQLSVESILRSAAEKFHGTPSILRRRKRDKPTPAEDNDLKIGRLSSDDFHTPIGKCTTDSPQSFKTAALLSLGPMDEQGSLDVSPPYRLRSKRLAVLKTVQNHLDFSSDEMSICDTTMKSACGNSDCANASSGVSSIQGKKLDEHMIGLETLTMNFAHTTKLDATQPNL

SEQ ID NO: 4424 - protein, 264 aa, Festuca arundinacea
MSRKKKVRRRSTGPDSVSEIIKKWKEQNQKLQEENGARKAPAKGSKKGCMAGKGGPENSNCKYRGVRQRTWGKWVAEIREPNRGNRLWLGSFPTAVEAAHAYDEAARAMYGATARVNFSERSPDANSGCTSAPPVLMSNGPTAVSHLADGKDESESPPSLTSDAPTATLDRSDAKDEPESAGTVVHEVKTEVSNDSTSVREERKAVEVFQPEGKALRKEEKVSYDYFNVEEVLDMIIVELSADRKMEVHEEYQDGDDGFSLFSY

SEQ ID NO: 4425 - protein, 272 aa, Oryza rufipogon
MGRRACCAKEGMKRGAWTSKEDDVLASYIKSHGEGKWREVPQRAGLRRCGKSCRLRWLNYLRPNIKRGNIDDDEEELIVRLHTLLGNRWSLIAGRPPGRTDNEIKNYWNSTLSRKIGTAATAAAGSRGGSTPDTARATDAASSSSVVPPGQQQQPASRADTDTATAAAAAAATTTTVWAPKAVRCTRGFFFHDRETAPLAAAAPAPAGELGDGDDVDCDYYCSGSSSAATTTSSSSLPAVVEPCFSAGDDWMDDVRALASFLDTDDAWNLCA

SEQ ID NO: 4426 - protein, 175 aa, Zea mays
  misc_feature (133)..(133): Xaa can be any naturally occurring amino acid
MDCGGALQLPPGFRFHPTDDELVMYYLLRKCGGLPLAAPVIAEVDLYKFDPWQLPEKAFGGEKEWYFFSPRDRKYPNGSRPNRAAGTGYWKATGADKPVGSPRPVAIKKALVFYAGKPPKGVKTNWIMHEYRXLADVDRSAAARKKTNNALRVIHYTMTFLRRTYLSPRNTDTCS

SEQ ID NO: 4427 - protein, 294 aa, Glycine max
RFCGRHKTCNEMAFFPANFMLQTPHHDDHHHQPPPSLTSILPTCAPQEYHGGVTFLGKRSMSFSSGIEHGEEVNAEEDLSDDGSQAGEKKRRLNMEQVKTLEKSFELGNKLEPERKMQLARALGLQPRQIAIWFQNRRARWKTKQLEKDYDVLKRQYEAVKSDNDALQAQNQKLQAEILALKSREPTESINLNKETEGSCSNRSENSSDIKLDISRTPAIDSPHSTHQQSRPLFPPSSARPAGVAQLFQTSSRPDLPSCQKIDQMVKEESLSNMFCGMDDQSGFWPWLEQQHFN

SEQ ID NO: 4428 - protein, 198 aa, Arabidopsis thaliana
MGRCPTRKVKKRRLSHKTARRDKFEVKGDDLVYTELRKPETEIKPLQLDEDLPGMGQFYCLHCDRYFSNVSVRDDHFKTKKHKKRVNMMMGQAPHSQLDADLAGGMGMPDNGPKLMSNLVFTELRKPETEDLPGMGQFNCLLCHRNFSNASVMDYHFKTKKHKKRVKKIERPAPHSQLDADLAGGMGMPDNGPKLMSA

SEQ ID NO: 4429 - protein, 1040 aa, Candida albicans SC5314
MSYNNRSGGGASGGYSRRGYHGSHRGGYRTGRSKYPEDRYLVGGMLSLNKGSHYESSDNRYIPNEIGSKSPENRSHRSSTKDGRTPSGLSTPLSSSDKVSTPISIESINGSDRNTGVNNKDSEFPKLSHHSDFTSTIPFSRSINPQKNFMVINDSHTPKTDKGIQSKKIRYNGEGVNHVSDPRIAQSNSNLQKPTKKTKKTPYKQLPQPKFVYNSDSLGPAPMSTIIIWDLPISTSEPFLRNFVSRYGNPLEEMTFITDPTTAVPLGIVTFKFQGNPQKASELAKNFIKTVRQDELKIDGATLKIALNDNENQLLNRKLESAKKKMLQQRLQREQEEEKRRQKLVEEQKKQELLKKKEKEHQESVKKEKSVEHESTIVSTRDKNLVYKPNSTVLSMRHNHKIISSVILPKDLEKYIKSRPYILIRDKYVPTKKISSHDIKRALKKYDWTRVLSDKSGFFIVFNSLNECERCFLNEDNKKFFEYKLVMEMAIPEGFTNNIRENESKSTNDVLDEATNILIKEFQTFLAKDIRERIIAPNILDLLAHDKYPELVEELKSREQAAKPKVLVTNNQLKENALSILEKQRQLFQQRLPSFRMSHDRTQQHKPKRRNSIIPMQHALNFDDDEDSESHSQSESEDEDEDETTASRPLTPVVSTMKRERSSTITSIEDDIELEEREIKKQKVKVPAIEAEIAPESSPEEGEEEEKEEVEIKQEAEEVDIKFQPTEESPRTVYPEIPFSGDFDLNALQHTIKDSEDLLLAQEVLSETTPSGLSNIEYWSWKSKNRKDVQEISQEEEYIEELPESLQSTTGSFKSEGVRKIPEIEKIGYLPHRKRTNKPIKTIQYEDEDEEKPNENTNAVQSSRVNRANNRRFAADITAQIGSESDVLSLNALTKRKKPVTFARSAIHNWGLYAMEPIAAKEMIIEYVGERIRQQVAEHREKSYLKTGIGSSYLFRIDDNTVIDATKKGGIARFINHCCSPSCTAKIIKVEGKKRIVIYALRDIEANEELTYDYKFERETNDEERIRCLCGAPGCKGYLN

SEQ ID NO: 4430 - protein, 256 aa, Selaginella remotifolia
ETWLVTTTSSSNPEVGLATGLAATGGAQDLLNPPLNKQKEPPVGRGKIEIKRIENATSRQVTFSKRRGGLLKKAHELSVLCDAQVALIIFSSTGKLFEYASTSMKEILDRYGKYPESVQGGNMASHHEASDFISHEIRRLKQQLQRSQQSRRHLLGDDLSHLPIKDLQNLEQQLEVGLSRVRSRKDQVLMDQVDELRRRELTLHKDNEMLRRRLSDVQGMAESGRSTLIVNPWRQGNLLQTWQMYPCHFLDTKAAA

SEQ ID NO: 4431 - protein, 285 aa, Brassica napus
  misc_feature (270)..(270): Xaa can be any naturally occurring amino acid
MASNNNNNLSEQPPSDDFFEQILGISNFSASSSSGGLSGLPGGLSGGVGTPPPMMLQLGSGEEGSHHNHMGGGGGGPLGFHNGMFPLGLSLDQGGKGQGFLKPDGSGKRFQDDVVDNRCSSMKPVFHGQPMTQPAPPMPHQQSSIRPKVRARRGQATDPHSIAERLRRERIAERIRALQELVPTVNKTDRAAMIDEIVDYVKFLRLQVKVLSMSRLGGAGAVAPLVTEMPLSSSTEDETQAVWEKWSDDGTERQVAKLMEENVGAAMQLXQSKALCIMPVSLAMA

SEQ ID NO: 4432 - protein, 197 aa, Anemone nemorosa
NGILKKARELTVLCDAQVSLIMFSCTGKLAEYISPSTTPKKLYDQYQKATGVDLWNSQYEKLKDSLKQQKEINMKLRKEIGQRTGMESLDGESFEKLRSLEQDLDGTSKVVRERKFHMISTQTETTRKKIRSQQEIYKRMVREIEARGEVLYYEGNLESIMAMSNGGGEDFVAYQLQPNMQEVEDFGLYGFQLAQPN

SEQ ID NO: 4433 - protein, 109 aa, Brassica napus
CGFCQVYPIIGDQSKSKASKKKIGYPLSKNCYKTPSKVPGKFNQQHPLDHRFELPQVPQVLVKIKSTGSLLGPMVSKGVSEKKKSDDDNNNKTEKKGPPDSNKVSPSPD

SEQ ID NO: 4434 - protein, 106 aa, Solanum tuberosum
AGFLGLMASMETPTDIITKKDEVIKSCKKKIKKPRYAFQTRSQVDILDDGYRWRKYGQKAVKNNKFPRSYYRCTHQGCNVKKQVQRLSKDEEVVVTTYEGMHSHPI

SEQ ID NO: 4435 - protein, 212 aa, Triticum aestivum
MPDLPCDGDGVCMVCRAAAPPEVELLRCATCATPWHSPCLSKPPALADAAAWACPDCSGEDASPSAAPAPAPTAAPGGAGGGSGLLAAIREIEADASLTEQEKAKRRQELLGGKTAVAGDDDEDEEEQDEDNALEIVGKNFSCVFCMKLPERPVTTPCGPHFCLKCFEKWVNSGKRTCGKCRGPIPSKNASPPRDYWVGCRFIRRARTGKKG

SEQ ID NO: 4436 - protein, 254 aa, Triticum aestivum
MVKESASPGSGSGSPGGAAEKMGRGRIEIKRIENTTNRQVTFCKRRNGLLKKAYELSVLCDAEVALIVFSGRGRLYEYSNNSVKATIERYKKATSDTSSAGTVAEINAQHYQQESAKLKQQITTLQNSNRTLIGDTMATMSHRDLKQLEGRLDKGLGKIRARKNELLCAEIEYMQRREMELQNNNFFLREKVAETERGQQQTLNMMGAASTSNEYEQNMIHCDPRTFLQFNFMQQQPQYYSQQEDRKSLNSVGR

SEQ ID NO: 4437 - protein, 347 aa, Oryza sativa (indica cultivar-group)
MDYEFKTYKKRQRGQQQMDFELKTCHRKRQRRRGHQQTVELPDEIVREVLIWLPVKSLARFKSVCKAWLSIISESCFIREHLQCSKLKRYWNPSSFLITPHIPLKPGDSIFAAFSTDIRFYQWSLQEDTRAAATLLYRRHFPAGEFEPVLPMAHCDGLVLLPTKTKAYVFNPATRDVLALPESNRNMRQRDICPPIGLGFDASTGKYKVARSFYRSREYNPMGIAAMGFEVFTLMEKKAVGEKLWWIHPTLCCIQRLLHTARGVYSITLIGRISKIPHRLCSVSAFKTKHLVSLRCLLTRTLKLKMMKLQLLSLAVNYVLLSFAILCNKYVSTCQEMSWIQIGIVGI

SEQ ID NO: 4438 - protein, 548 aa, Arabidopsis thaliana
MSLSSNPPVCSPEKEERSEMKIEIQCMENKQPLAASCSSASEGSGCFFLKSPEIATPATVSSFPRRTSGPMRRAKGGWTPEEDETLRRAVEKYKGKRWKKIAEFFPERTEVQCLHRWQKVLNPELVKGPWTQEEDDKIVELVKKYGPAKWSVIAKSLPGRIGKQCRERWHNHLNPGIRKDAWTVEEESALMNSHRMYGNKWAEIAKVLPGRTDNAIKNHWNSSLKKKLEFYLATGNLPPPASKFIVLKDIADGDRDSKQSSATKPFKDSDSLTQTSSGNTDSNEVGRDHFDSSSALLEEVAASRRIGVNEYACSPVEYKPQLPNLEPISEEVRINSKAYFERSIQRKVENGFGTPKHGNLYYKSPLDYYFPSEADLQHMYGYECGCSPGAASPVSLMTTPCNKDSGLTATRSPESFLREAARTFPNTPSIFRKRRKVVLAAKTDAVVVVNGVVKEVDRKEESKDMRKSLLLETTDNCSDDEELGLNGNAFNLSPPYRLRAKRTAVIKSRQLEFTSEKEKQPDNEIEFTSAKEKQPDNEIKTSEEDKPV

SEQ ID NO: 4439 - protein, 316 aa, Glycine max
MGRTPCCDKKGLKKGPWTAEEDEILSSYIKKNGGHGSWRSLPRMAGLLRCGKSCRLRWTNYLRPDIKRGPFTLEEEKLVIQLHGILGNRWAAIASQLPGRTDNEIKNLWNTHLKKRLKSMGLDPKTHEPLASSTYPFHKAPASVSTRHMAQWESARLEAEARLSNESSRFSHNTTNNSNSDNNKTTDSDYFLRIWNSEVGEAFRNVHHHKADDDNNNNKITTNTPTSSCHSPLSTGSSSNKCESIATNADLASNAPEIITPSSIVKQEFEWGTRGSDSSSSNDMEDSSDTALQLLLDFPINNDMSFLEGNSFVCPL

SEQ ID NO: 4440 - protein, 151 aa, Glycine max
MEGNYGSTRRYVPRADSSLSFLYNYNYTPYPGMEVKQQTLAGTSSSMEKVNCGNQEKKKRLTSDQLDSLENSFQKEIKLDPDRKMKLSKELGLQPRQIAVWFQNRRARWKNKQLEHLYDSLKQEFDVISKEKHNLGEEVMKLNTLLREQAF

SEQ ID NO: 4441 - protein, 202 aa, Tricyrtis affinis
RASRNSTNRQVTFSKRRNGIIKKAREISVLCEAQVSVVIFSSSGKMSEYCSPSTTLSKVLERYQQNSGKKLWDAKHENLSAEIDRIKKENDNMQIELRHLKGEDLNSLQPKELIPIEEALQNGLIGVRDKQMDFLKMLKKNEKMLEEENERLTYILHHQHLSMDGNVREMDVGYHQRERDFNSQMPMAFRVQPIQPNLQENK

SEQ ID NO: 4442 - protein, 188 aa, Tricyrtis affinis
EVSLVMFSSTGKLSEFCSPSTDTKRIVDRYQQVSGINLWNAQYEKMQNTLNHLKEINHNLRKEIRQRMGESLDGMDIKDLRGLEQNLDEALKLVRHRKYHVITTQTDTYKKKLKNSQEAHRNLLRELVSSEMKDEHPIYGFVDDDPSNYEGALALANGAGSHLYEFRVQPSQPNLHGMGYGSHDLRLA

SEQ ID NO: 4443 - protein, 272 aa, Oryza rufipogon
MGRRACCAKEGMKRGAWTSKEDDVLASYIKSHGEGKWREVPQRAGLRRCGKSCRLRWLNYLRPNIKRGNIDDDEEELIVRLHTLHGNRWSLIAGRLPGRTDNEIKNYWNSTLSRKIGTAATAAAGSRGGSTPDTARATDAASSSSVVPPGQQLQPASRADTDTATAAAAAAATTTTVWAPKAVRCTRGFFFHDRETAPLAAAAPAPAGELGDGDDVDCDYYCSGSSSAATTTSSSSLPAVVEPCFSAGDDWMDDVRALASFLDTDDAWNLCA

SEQ ID NO: 4444 - protein, 247 aa, Oryza sativa (japonica cultivar-group)
MAQDDEDVGLALGLSLGSGGHRRQRESRDEAPSSAAASLLTLRLPAESGGQPQVVVKREVVRAEEEEYEYEYERALYSSSAAAADDDEGCNSRKKLRLSKEQSALLEDRFKEHSTLNPKQKVALAKQLNLRPRQVEVWFQNRRARTKLKQTEVDCELLKRCCETLTEENRRLHRELQQLRALTHSTAAGFFMATTLPVPAATLSICPSCERLATAAAAGASPTAAADRTNKPTAPHLFSPFAKSAAC

SEQ ID NO: 4445 - protein, 270 aa, Oryza glaberrima
MGRRACCAKEGMKRGAWTSKEDDMLASYIKSHGEGKWREVPQRAGLRRCGKSCRLRWLNYLRPNIKRGNIDDDEEELIVRLHTLLGNRWSLIAGRLPGRTDNEIKNYWNSTLSRKIGTAATAAAGSRGGSTPDTARATDAASSSSVVPPGQQQQPASRADTDTATAAAAATTTTVWAPKAVRCTRGFFFHDRETAPLAAAAPAPAGELGDGDDADCDYYCSGSSSAATTTSSSSFPAVVEPCFSAGDDWMDDVRALASFLDTDDAWNLCA

SEQ ID NO: 4446 - protein, 269 aa, Oryza glumipatula
MGRRACCAKEGMKRGAWTSKEDDVLASYIKSHGEGKWREVPQRAGLRRCGKSCRLRWLNYLRPNIKRGNIDDDEEELIVRLHTLLGNRWSLIAGRLPGRTDNEIKNYWNSTLSRKIGTAAAGSRGGSTPDTARATDAASSSSVVPPGQQQQPASRADTDTATAAAAAAATTTTVWAPKAVRCTRGFFFHDRETAPLAAAAPAPAGELGDGDDVDCDYYCSGSSSAATTTSSSSLPAVVEPCFSAGEDWMDDVRALASFLDTDDAWNLCA

SEQ ID NO: 4447 - protein, 253 aa, Nicotiana tabacum
MALETLNSPTTTTPPTFQFENNGQLRYLENWTKGKRSKRPRSMERQPTEEEYLALCLIMLARSDGSANQEQSLTPPPAPVMKIHAPPEEKMVYKCSVCGKGFGSYQALGGHKASHRKLVAGGGGGDDQSTTSTTTNATGTTSSANGNGNGSGKTHECSICHKCFPTGQALGGHKRCHYDGGNSNASVSVSASVGVTSSEGVGSTVSHRDFDLNIPALPEFWPRFGFGEDEVESPHPAKKSRLSLPPKFELFGE

SEQ ID NO: 4448 - protein, 308 aa, Zea mays
MGCRSCDKPKMNYRKGLWSPEEDQRLRDYILKHGLGCWSAVPAKAGLQRNGKSCRLRWINYLRPGLKRGMFSQEEEDVVIDLQAKLGNKWSQIAMHLPGRTDNEVKNYWNSYLKKRVMQQAQGASSNSSPKSPPELTSMSTTADLSSMSMPMPMSMPMHQRHHVKNNSGGGSTTTSHDQQDDANISGSRAALSAPPPPPLAQQPFEHQAARSFVFSDWAPESYSLSTHWPAATSTSGNVTPSHGSAAAFGDQMSGTYGAGGLPPPHQDHHHSAAPATTGIAGSGYFDLLNMGDIYGGFSSTNNDDLLF

SEQ ID NO: 4449 - protein, 1463 aa, Oryza sativa (japonica cultivar-group)
MASLPEAPVPPESARMGSPPPSHSPSPPPLQGDPSLPTDAPPPEPSPQPHHATPIPPPSPGQATEGWPRAEEPQPPIGGTPGAAGPPAPPSFFPSLELGTSAAPPALEAAAAGAGQPGSPSPCPPAEPAAEFYPGSAASSPSSSSYETAEDDSPASPPPTPPPLVLCASPDSSYTESSPTRDRFGDEEGSHAAPEPPPPPTPLEGGPDASSAEPAAMASRAREPMGSRTAPEPPTPPLESGQEGFQQQQPHPPPTTHPECDSSEPAELPLPPTSPAEIAYTSPDSVEVDVVAVSPEEAPGSTVAMEVMYGETDTSAVSVSPVLGSAETDAAEIDVIAGMQEEAPGSTVAMEVMYRENDTAAVSVSPVLESREPDVAEGDVVSGVQEAHGSKFSMEVMYRETDAAAVSVSPVLESGEPDKAENDAVEEMQEEAHGSRFAMEATYGEPDASAVSVSPVLESVEPDVTEIDVVSEIQEEAPDSTLAMEVTSGETDTAAVSAFPVLDGGDPDAAEKNVVAGMQEEEAPDSTLAIEVTSGETDTAAVSVSPVLEGVDPDAAEIDVVAGMQEEAPGSTLAMEVTYRETDATAASVSPVLDSGDPDAAEVDVVVGMQEQAAGSALAMLVTYGETDTSAVSVSPVLESGEPDAAQIDVVAGMQEEAPGSMLAMEVTYREVDAATVSVSPVLESVEPDAAKIDVVARMQEEAPGSKLAMEVMYGETGTAAVSVPLVLESREEGSLQESMQRPSSPTMNIEQESMQRPFSPTIGTETSSPEMAPAGSENCKVSWLPLPPPTPLGESMPSLPVAAAPKVLLVMPEEAVESVPSSEALDVEKPASITQAEPSSPNTPPPGFENFKSSWLPLPTTPPPVETTDVLPDVVVTKAVEAPIEEVSRPLPALEVTNMESDTVLSILPTTVLPTEGTEGLLQQPLLRPPSPVVQSEPCLQNEMAPPGFENFKSSSEPCSAEEIAPPGSDNFKSSSEPCLPEEMAPPGFENFKSSSEPCSQEEMAPPGFENFKSSWPPLPTLPQTVPDAAAADALAATVEEAAGPPPALELEAMDVDMDAIHPPPLPFDSGVESLQKPLPRAPSPIMQEAPCSPDRAPPGFETYKSSQLLLPSPSLAQTTNVRQDQSVTEPVSVIEEAPQLLHSVEVMGVHMDAVPPLLPSSESGADGLSPQQFAQPPPAEKDTTTCLPDMVHSGCDNSEPSQLLSLPAVISPVQTPDGLADVPAIDRVAVALEESPQRPLVSGEMEAGTVPIRSSPLKNISEGSLPQLESESHSPTSQAADSLLDASDSKSVAVASEEMSQLPLASQATTTDLVSTTAMQPQSEGIVDESLQPQHPPSSTAHDSPCLQDSVPLVPPPPSPYLNKEVGQMVCGSCRILLAYFRGAGYVHCTCCQTMNYVLEAHEVGKVHCGHCATLLMYPFGAPAVKCSLCLFVTEIGERNVRRRLSIEQPTRTNSSGLAEA

SEQ ID NO: 4450 - protein, 210 aa, Oryza sativa (indica cultivar-group)
MDYEFKTYKKRQRGQQQMDFELKTYHRKRQRRRGHQQTVELPDEIVREVLIWLPVKSLARFKSVCKAWLSIISESCFIREHLQCSKLKRYWNPSSFLITPHIPLKPGDSIFAAFSTDIRFYQWSLQEDTRAAATLLYRRHFPAGEFELVLPMAHCDGLVLLPTKTKAYVFNPVTRDVLALPESNRNMRQRDICPPIGLGFDASTGKYKVA

SEQ ID NO: 4451 - protein, 435 aa, Ashbya gossypii ATCC 10895
MSNKFHCDICSSDCTNRVRISCAVCPEYDLCVPCFSQGLYNGNHRPYHDYRIIETNSYPILCDDWGADEEQALIKGAQTLGLGNWQDIADNIGSREKEEVYEHYVKYYLKSDFYPIPDITKDIRVPQEAFLEERKRRIERFREKPLQPPRKPLASVPSCHEVQGFMPGRLEFETEFENDAEGPVKDMVFEPDDQPLEIEVKLAILDIYNSRLTTRAEKKRLLFENNLMDYRRLQSIDKKRSKEAKELYNRIKPLARIMSPQDFEEFSKDVLEELRCRTRIAQLQEWRMNGITTLEAGLKYERDKLTRIQTLERFGSSIYGSSAQANSNRYRASAAHRTASEFSQNYSDCGNRKKAITTGDIQHGADFGLLSPEEQQLCIQLKIMPKPYIAIKEVIFRALLRTGGMLKKKHCRELLNIDQAKANKIYEFFSSQNWL

SEQ ID NO: 4452 - protein, 282 aa, Catharanthus roseus
MVNFSEAEGENSRKREKSFFPQEEENSGNENFDGYFHHPEKKRRLTADQVQFLEKSFEVENKLEPERKVQLAKELGLQPRQVAIWFQNRRARYKTKQLEKEYDSLKSSFDKLNADYDSLFKENEKLKNEVKLLTEKLLMREKEKGKSKTCDSLCGFDIEPDEKQLASNSAVCLPGIKQEDAASSAKSDVFDSDSPHCTDGNHSSNVFEAELSDFSQDEDDNLSISLLQPSYVFQNLKMNAMMNCSRIRVIWGFPLKIKLVGSGVTDDHDSLCCRISRDYFLM

SEQ ID NO: 4453 - protein, 54 aa, Cocos nucifera
YQWRKYGQKPIKGSPYPRGYYKCGSLRGCPARKHVERAPDDPSMLIVTYEGEHN

SEQ ID NO: 4454 - protein, 180 aa, Brassica napus
  misc_feature (135)..(135): Xaa can be any naturally occurring amino acid
MEAFGGFHKEDDEQMVLPPGFRFHPTDEELITHYLHNKVLNIDFSAKAIGEVDLNKAEPWELPYKAKMGEKEWYFFCVRDRKYPTGLRTNRATQAGYWKATGKDKEIFRGKSLVGMKKTLVFYRGRAPKGQKTNXVMHEYRLDGKLSPHNLPKTAKNEWVICRVFHKTAGGKKIPISTLM

SEQ ID NO: 4455 - protein, 499 aa, Oryza sativa (indica cultivar-group)
MATAAVMAAVPSSSPADAAEAVVMTEAVPSLPQRQQPVFVEGRGGKLRDHAYSRKQKSLGLLCSKWGSLVHLGDSWILAFWFPVLTEFFCAFSSFVALYNRDDVESIGLDDAARRLGVERRRIYDIVNVLESVGVSSFFLRLSWTGFLFFLARFDSDICFRFICEKILVRKAKNRYSWIGFGGVPMALRELKERALREKSGLAPLPVEEPSAAIMSDDEDEDKMGDADGDTESEKLSQPVDNPSDNKPGAPRCRLRSDHRKEKSLGLLTQNFVKLFLTMEVDTISLDEAAKLLLGEGHAENTKVRRLYDIANVLSSLNFIDKIQQADSRKPAFRWLGSAGKPKAENGVTIAVPPPGKTISNKRAFGTELTNIDINRSRLDSTIPKKAKLTQSGGEILKNCKLSVQKQLGQGSKGGFVYGPFHPAGARKQELDNGNKGHTDNVQNWESLAASFRPQYQNQALGDLFAHYVEAWKSWYSEFAQGSSMMQQHFGMPVINQFL

SEQ ID NO: 4456 - protein, 423 aa, Arabidopsis thaliana
MEEQKIQEKSLAHGAAPPLTAVERFLNGQKNEALCFKKQERSIDRPIVKTTRAIEIRNENKENMMFGPRKEKNLAVIGEIVVKGAAKDYTCKDITKKQPYKNIIKGQWTADEDRKLIKLVMQHGERKWAVISEKLEGRAGKQCRERWHNHLRPDIKKDSWSEEEERLLVEAHTRIGNKWAEIAKLIQGRTENSIKNHWNATKRRQNSKRKHKRSKNADSNSDIDDLSPSAKRPRILEDYIKNIENNDKNNGENIMTTSGNNVLSTSNYDQFNSEDSTSSLLDDPYDGELVFLKNIFENHSLENINLSQGTEITQSSSSGFMIENPKPKPNLYNNTFGTHLGAMVTEPANSSHLASDIYLSDLLNGTASSSSSLTFLSSNNNEHAGENELLLPQANSTSERREMDLIEMLSGSTQGSNIWFPLF

SEQ ID NO: 4457 - protein, 213 aa, Petroselinum crispum
MIQTQKVDNRRMGNHKQKWTAEEEEALKAGVKKHGMGKWKTILVDPDFATALTHRSNIDLKDKWRNLGISSSAAAQVSKDKSPVLSITNGSAAIPIAQTAITAQNAITAQNTVTAQNTVTAQNAATAQKASTTVALVDANAISSSPKTPANAVTIPTKRYYSLIFEAISSAKDPRGADFNTIATFIEQKNEVPHNFRRALSSLVRRLTMQKKL

SEQ ID NO: 4458 - protein, 264 aa, Oryza sativa (japonica cultivar-group)
MTNAGSTPTIDDGYGGVGMEAEGDVEEEMMACGGGGEKKRRLSVEQVRALERSFEVENKLEPERKARLARDLGLQPRQVAVWFQNRRARWKTKQLERDYAALRHSYDSLRLDHDALRRDKDALLAEIKELKAKLGDEEAAASFTSVKEEPAASDGPPAAGFGSSDSDSSAVLNDVDAAGAGPAATDALAPEACTFLGAPPAAGAGAGAAAAASHEEVFFHGNFLKVEEDETGFLDDDEPCGGFFADDQPPPLSSWWAEPTEHWN

SEQ ID NO: 4459 - protein, 136 aa, Triticum aestivum
MKRPRGGSPSSLAAMTNPDDDGYGVVGMEAADADADADEEMMACGGGGGEKKRRLSAEQVRALERSFEVENKLEPERKARLARDLGLQPRQVAVWFQNRRARWKTKQLERDYAALRHSYDALRHDHDALRRDKDAL

SEQ ID NO: 4460 - protein, 242 aa, Corylus avellana
MEFQNQSMSVSPQRKLGRGKIEIKRIENTTNRQVTFCKRRNGLLKKAYELSVLCDAEIALIVFSSRGRLYEYANNSSVKTTIERYKKACADSSNSGSVSEANTQFYQQEAAKLRGQIRSVQDSNRHMLGEALSELNFKELKNLEKNLEKGINRIRSKKNELLLAEIEYMHKREVDLHNNNQFLRAKIAENERNQQNLNVMPGGGNYELMQSQSFDSRNYFQVDALQPNHHYPRQDQMALQLV

SEQ ID NO: 4461 - protein, 101 aa, Arabidopsis thaliana
MASGSMSSYGSGSWTVKQNKAFERALAVYDQDTPDRWHNVARAVGGKTPEEAKRQYDLLVRDIESIENGHVPFPDYKTTTGNSNRGRLRDEEKRMRSMKLQ

SEQ ID NO: 4462 - protein, 216 aa, Pisum sativum
MVRGKTQMKRIENATSRQVTFSKRRNGLLKKAFELSVLCDAEVALIIFSPRGKLYEFSSSCMQDTIERYRRNTRSAQPLQRSDEQNMQNLKQETASLMKKIELLEASKRKLMGEGLGSCSLEELQQIEQQLEKSVSTVRAERIRFYKNQIEQLKEKEKVLLAENSRLSKQPQPQLLQLPPPPPPNDHPRENQPYAESSSPSSDVVTELFIGLHRSS

SEQ ID NO: 4463 - protein, 228 aa, Brassica napus
MALEALSSPRLASPVPTLFQDSAVGFHGSKGKRSKRSRSEFDRSLTEDEYIALCLMLLARDGNRTRHLPSSSSSPPLLPTLTSTHLHKCSVCDKAFSSYQALGGHKASHRKNSSQTQSSGGDEKSTSSAITIASHGGGGGGSVKSHVCSICNKSFATGQALGGHKRCHYEGKNGSSSEGVGSTSHVSSGSHHHHRGFDLNIPPIPEFSTVNGEEEVMSPMPTKKLRLE

SEQ ID NO: 4464 - protein, 212 aa, Brassica napus
  misc_feature (36)..(36): Xaa can be any naturally occurring amino acid
MIEQRILPPMEGNLFRSDPQQAHEDGFSLRQKSNLXAHDPVVTLCGHLFCWPCIYKWLHVKLSPVSIDHHQNNCPVCKSSVAVTSLVPLYGRGMSLFSSKKQNSELTDIPRRPGPSTFTTQPSLSPTFHNHRYSPRAFTTTESTDLASAVMMSFLCPVIGMFGDLVYTRIFGTFTNTVAQPYQNQRMMQHEKSLNRVSIFLFFCFLICLLLF

SEQ ID NO: 4465 - protein, 285 aa, Triticum aestivum
  misc_feature (74)..(74): Xaa can be any naturally occurring amino acid
  misc_feature (236)..(236): Xaa can be any naturally occurring amino acid
  misc_feature (240)..(240): Xaa can be any naturally occurring amino acid
  misc_feature (252)..(252): Xaa can be any naturally occurring amino acid
MAGQPPQGPEDDFLDQFFSLTNSLSAAGRPSGDQPFSLALSLDAASDASGSRGGIGDDAGNAAERDGVQLPRAXFPPVFGGGLQPPHLRPSHPPPQMFHARTPEQGGPAGGPQPPAPRPKVRARRGQATDPHSIAERLRRERIAERMRALQELVPNTNKTDRAVMLDEILDYVKFLRLQVKVLSMSRLGGAGAVAQLVSDIPLSVKGEASDGGSKQQIWEKWSTDGTEKQVAKLMXEDIXSARQFLRSKALXLIPGPLATGYFDIQHSQDGQPKEPGPPHPALLF

SEQ ID NO: 4466 - protein, 250 aa, Arabidopsis thaliana
MSINNNNNNNNNNNDGLMISSNGALIEQQPSVIVKKPPAKDRHSKVDGRGRRIRMPIICAARVFQLTRELGHKSDGQTIEWLLRQAEPSIIAATGTGTTPASFSTASVSIRGATNSTSLDHKPTSLLGGTSPFILGKRVRADEDSNNSHNHSSVGKDETFTTTPAGFWAVPARPDFGQVWSFAGAPQEMFLQQQHHHQQPLFVHQQQQQQAAMGEASAARVGNYLPGHLNLLASLSGGSPGSDRREEDPR

SEQ ID NO: 4467 - protein, 263 aa, Catharanthus roseus
ASFLGKRSMSFSGVDICDQDGVGGGGGHGGEDDLSDDGSQLGEKKRRLNMEQVKTLEKNFELGNKLEPERKMQLARALGLQPRQIAIWFQNRRARWKTKQLEKDYDILKRQFEAIKAENDALQAQNQKLHAEIMALKNREPTESINLNKETEGSCSNRSENSSDNIKLDISRTTPAIDSHPQTSRPFFPSSLIRPNTAQQLFQTTSSSSRPPPADHHHLIQCQNNNNNNPTATVKEESSLCNMFCTIDDQTGFWPWLEQHHFN

SEQ ID NO: 4468 - protein, 234 aa, Asparagus virgatus
MGRGKIEIKRIENTTNRQVTFCKRRNGLLKKAYELSVLCDAEVALIVFSSRGRLYEYANNSIKSTIERYKKACADSSNSNAVIEVNSQQYYQQEAAKLRHQIQILQNANRHLMGDSLSSLTVKELKQLENRLERGITRIRSKKHELLFAEIEYMQKREAELQNDNMYLRAKISENERAHQVSVVQPGPEFDTLPTFDSRNYYNVHMLEAAPHYSHHQDQTALHLGYENKADPAA

SEQ ID NO: 4469 - protein, 310 aa, Arabidopsis thaliana
MPTLYKKAGCQFQLTTMSCNNGMSFFPSNFMIQTSYEDDHPHQSPSLAPLLPSCSLPQDLHGFASFLGKRSPMEGCCDLETGNNMNGEEDYSDDGSQMGEKKRRLNMEQVKTLEKNFELGNKLEPERKMQLARALGLQPRQIAIWFQNRRARWKTKQLEKDYDTLKRQFDTLKAENDLLQTHNQKLQAEIMGLKNREQTESINLNKETEGSCSNRSDNSSDNLRLDISTAPPSNDSTLTGGHPPPPQTVGRHFFPPSPATATTTTTTMQFFQNSSSGQSMVKEENSISNMFCAMDDHSGFWPWLDQQQYN

SEQ ID NO: 4470 - protein, 204 aa, Zea mays
MEMTVNGRDTEHHHHLGLALGLGLGLSLGMSGTTSPVEPAAPQTAAAPSSKLGLGQQSWNGAGLFFPASSGEQRSHADDRRLAALACHEMPFLRGIDVNRAPTTGGARGSCGASEDEEPGASSPDSTLSSLSGKRGAPTRSAGGEQERTGAGSDDEDDSGAGGGGSRKKLRLSKDQSAVLEDSFKEHSTLKPKQKAALARQLGL

SEQ ID NO: 4471 - protein, 285 aa, Zea mays
MAGQPPPQGPEDDFFDQFFSMTAGGSYPGATAGGGRAPGDQPFSLALSLDAAAAEASGSGKHADGGKADREAIQLPGLFPPAFGGGVQPPHLRATPPTQVFHAQQPKQGGAAVGPQPPAPRPKVRARRGQATDPHSIAERLRRERIAERMRALQELVPNTNKTDRAAMLDEILDYVKFLRLQVKVLSMSRLGGAGAVAQLVADIPLSVKGEASDSGSKQQIWEKWSTDGTERQVAKLMEEDIGAAMQFLQSKALCMMPISLAMAIYDTQHSQDGQPVKPEPNTPS

SEQ ID NO: 4472 - protein, 210 aa, Oryza sativa (indica cultivar-group)
MSSRDAAATFHVYQPVQIPTATVAPAAAVSAAPAEAVAQLVPAPSKKAAGAAGGKDRHSKVNGRGRRVRMPIVCAARVFQLTRELGLKSDGQTIEWLLRQAEPAILAATGTGTTPAAFVSSSAPSTSSHQHTLLGKRQRQESAAADAVSVAGAASAFWAALPAPGRPDAWGFSPLDAQPTYVPMAQAHHHHLNLLAALSGAARRAEEESR

SEQ ID NO: 4473 - protein, 748 aa, Lilium longiflorum
MVKELKVDDFFTDWDAKNGFELGWPQPGIDHPTNFGDSPNGSAHVSPNGSALVSPDASATSSNGNVSSSTSFEGDDVYADSEIFSDIVLSYINRMLNEEIIDEKLDIFQGHPELEATEKPFYEILGEKYPPPSDQPSMYNNPSPETPDSNIYVKSSSSNSINSVVTSGNWAFGAIELPQNYLIPVDYSSQSSFGSTNSVHNAIEGLGEPTMTNIEARDQFSESMLAEQFMRGVEEARKFLPKEDKLVINLEDNGISLPPKLMYDNGLNEVKEEEKEYTAYGSRGRKNRHSDELDLEEGRSNKQSAVDYTEETLRSEMSDLVLLCPNCDGKEGVSSKTWTQNEATRSPQNGHTRGSGSSKSRGKKPSKTEVVDLRTLLIHCAQTVAIDDRRSANDLLKQIRQHASPFGDGMQRLAHYFADGLEARLAGMGSEKYHSFVAKPVSATDILKAYGLYMSACPFKKVSFYFSTQMILDTTEKASKIHIVDFGIYFGFQWPSFLQRLSKRPGGPPKLRITGIDLPQPGFRPAERIEQTGRRIAEYARSFNVPFEYQGIAAKFETIKIEDLRIAEDEMVVVNCSFSLKNLADETVAEDCPRTRVLSMIRKLNPALFTLGVVNGSYNAPFFVTRFREALFHFSALFDMLEMNTPRKDEQRLLIEQNIFGRDAMNVIACEGTERVERPETYKQWQVRNFRAGFTQLPLDRDIVKKSKCKVKELYHKDFVVDEDGRWLLLGWKGRIIYALSAWTPNSR

SEQ ID NO: 4474 - protein, 161 aa, Oryza sativa (japonica cultivar-group)
MVVILASLLCALICVAGLALVARCACRRRGAATTTTTTTTTPAATSPAPKGLKKKAIDALPTVSFALKQQQQQAECAICLAEFAGGEELRLLPHCGHAFHVSCIDTWLGTHATCPSCRATVGTSTLFLPLPGRCRRCGEVDLPTLHDFSTATATAHHNTPP

SEQ ID NO: 4475 - protein, 313 aa, Medicago truncatula
MHSLFLPNTNATTLTSSLLFLNTNNNFSSKARFQCSIKATNPNTKQVTNSNKKVIILWDLDNKPPHGPPYNAALSLKTFAERFGDVVSISAYTKRHSFFNLPLWNPNPNPNSFLCRVCGYECRSLTDVNIHFKRVHEYQKRKTLNRLKSIKLKRSKVNFIRKVHRYNEAKSNNAPLKVGFGMASELRRGGVFVKIVTVRGKVKAADSSLKREMMSGGVDSLVLVLVSDDSVFSKMLRKVREVKVETVVVGDYWGRDLGRNADLWLPWILVENGNVEYLMGGTVEEDLDDELEEDENIYDYDDYDYDDDGFYVY

SEQ ID NO: 4476 - protein, 634 aa, Oryza sativa
MAGEGKGDGVREMEGEAPRSPDSVVGVMDSDAEMPMSSDEEMLDDEDYYDYSDDMGEDDDGSGGGGGGDSDGEEEEEGDEELVGGDYEGREAEGSDEVVSRREQRYIVLTEKDINERQEEDIGKVSAVLSIRREEACVLLHHYKWNISKLSDEWFADEEKVRDIVGLLLNGIDLPNSRKLTCGICFEGYSSDVMSSADCDHFYCHECWEGYISAAISDGPGCLSLRCPDPSCGAMVLQNMINKLAKDDDKVRYARFILRAYVEDSKKTKWCPAPDCTCAVEFVSDGNYDVSCNCKFSFCWNCTEEAHRPVNCETVSRWILKNSAESENMNWILANSKPCPKCKRPIEKNQGCMHMTCTPPCKFEFCWLCLGSWAEHGERTGGFYACNRYESAKKEGVYDETEARRERAKNSLERYMHYYERWASNQTSRQKAQADLQKAEKEQLAKLTDVFGIPETQLKFIIEAWSQIIECRRVLKWTYAYGYYLDDKVKSEFFEYLQGEAESGLERLHQCAEKDLQSFLTVRSDNTEPAPSIAEFGDFRVKLAGLTSVTRNYFENLVQALEAGLEDVHSTAQGTTSSNATNIPSKKAVTKGKTKKQLPRTSSDNSDEGWPCERCTFINPSSVDACSVCDKHRY

SEQ ID NO: 4477 - protein, 122 aa, Brassica napus
PRVRKRVKKGKGIFTGSTKAETAGSTLKEILEDFMRQTVKMEKEWIASWEMKEREREKREHEWRRRMADLEEERAAAERRWMEREDERRLREEARARKRDTLIDALLNKLNRDHNDDHYQGF

SEQ ID NO: 4478 - protein, 146 aa, Sophora tetraptera
VTFSKRRAGLLKKAHEISVLCDAEVALIVFSNKGKLFEYATDSCMEKILERHERYAYAERQLEANNSETQGNWTIEYTRLKARIDLLERNHRHYMGEDLGSMSLKELQSLEQQLDTALKTIRTRRNQLMYESISELHKEEKVIQEQ

SEQ ID NO: 4479 - protein, 110 aa, Sophora tetraptera
MGRGKIEIKRIENTSNRQVTYSKRKNGILKKAKEITVLCDAQVSLIIFGSSGKMHEYISPSTTLIDILDRYHKASGKRLWDAKHENLSNEIDRVKKENDSMQIELRHLKG

SEQ ID NO: 4480 - protein, 256 aa, Oryza sativa (japonica cultivar-group)
MEGEDLGSWLGLGIGGGGYAYGGDDCRRSPSSPSPVQMLFSQHVKEEITRGYDHGRDEEQASGSKIMKGERGARLRVMRSIRNSGGDGSRSRVLSLGDDGGDGGSGGGGGGGTRKKLQLTKEQSTLLEDSFRVHNILSHAQKHELARQLKLKPRQVEVWFQNRRARTKLKQTEVDCEFLKRCCESLTEENKQLKHELMELRRLASPAAAAAGSQLYVQFPRAAAAAMVNVCPSCEKVTVMGGGGGETGKSSSSYSS

SEQ ID NO: 4481 - protein, 186 aa, Triticum aestivum
VEVVTPETEAEVVTPETEVDGDDPISKKKRRQMRNRDSAMKSRERKKSYVKDLETKSKYLEAECRRLSYALQCCAAENMALRQNMLKDRPIGAHTAMQESAVLSETLPLVSLLWLVSIVCLFLTPGLPNRSLVAPRRAERDLAMVAGKPSSDQPETLELLLHGRRWRGTRERIKLDTPPLRAAAAC

SEQ ID NO: 4482 - protein, 562 aa, Oryza sativa (japonica cultivar-group)
MAADDAARSSRRMDLNLYLGLPRAPRLRRPDLGSDLALGTPMLSSSPSSSAASADAPPLETEPLHPPYSPPPAELVRPPTPLPEPYDPSAPEAHPPYVPPPVPPPEAIPELADDLEFGFSHPPLLLRPSELLGWVDRPSSSTASSSFRPERVDRYRPPVICLNSRQSRCLRPRRFRSDLPPLGSEAPALENDAAAQPPPQEPMQDTVEENKVVADGAIVGASEEEPAERGKSVAMFECNICFEMASEPVVTSCGHLFCWPCLYQWLHVHSTHKECPVCKGEVTEGNITPIYGRGNSTSDAEKKVAEEGNVSGPTIPPRPHGNRLESFRQKFHHLRPISRRLGEAHGILSSWRRILDQQIMNSVSRFEGPPESTVQEMIDHAHHASRLGRITTRMRARRLQREAENSTFVASSAAESGLPANSTSDLPRRSSSPFSSERIDLLQHFVDLASTERLASAVSDLRRMVRPSPYGASTSSNPPNPPNTELLPVDGNHVAVALAADQASNSSTMAVIQEDAAFTESTGEPSNAGSSRSLRRRGRNDALGSLDVDGVGLHRNKRRRLN

SEQ ID NO: 4483 - protein, 113 aa, Sophora tetraptera
ALIVFSSRGRLYEYANNSVKATIERYKKACSDSSGAGSASEANAQFYQQEADKLRVQISNLQNNNKQMMGEHLGSMNAKDLKNLEGKLEKGISKIRSKKNELLFAEIEYMQKR

SEQ ID NO: 4484 - protein, 333 aa, Oryza sativa (japonica cultivar-group)
MDPFHHLNSSFSNPYHPLLASPPHHFAPDPLPPPPPPPPPPLLPADPPSLERERLPQWSHAETAAFLAIRADLDHSFLSTKRNKALWEAASARLHALGFARTPDQCKSKWKNLVTRFKGTEGAAAVAAAGTDQMQGGQGGGAAARGSSSSFPFHDELRRIFDARVERARALERKKVKGKDPDDDHDGGGDGDEDDEEEADQQVDEEDDGASGDTTRAGSKKRRRKAAAAARRTGSTGGVEGEVEAMLREFMRRQIEMEERWMEAAEAREAERRAREEEWRTAMVALGEERLALVRRWREREDAWRARAEEREERRHQLVAALLAKLGAGDASA

SEQ ID NO: 4485 - protein, 512 aa, Brassica napus
  misc_feature (418)..(418): Xaa can be any naturally occurring amino acid
MSFNFNPSSSSSPPPPPDEGERGEEVKKMEEEEEDECVENKQSTAASCSSVSEGSGGGGGSSFLKSPPAVASPPTVSPTHRRTSGPIRRAKGGWTTEEDETLRRAVCTYNAKSWKKIAEFFPDRTEVQCLHRWQKVLNPDLIKGPWMQEEDEKIVELVKKYGPAKWSTIAKSLEGRIGKQCRERWHNHLNPGINKEAWTPEEELALMNAHRVHGNRWAEIAKVLPGRTDNSIKNHWNSSLKKKSEFYQANGALPPSAAKNGVLDSATKRPLFYQRRDSAIQINKPDEDGRHQLNSSVPLEEVVAASPLTNDQLPRPEPSPENGYHLYYKNHQTEYSMASEADKQRMYGYECGCSPSASPVIFFTPPPPSRKEYINGLRPTSPESYLREAARTFPNTPSIFRKRRRRTVVVSDSDNKAXKTDEEGTKEAVVVVVVDQKVNEISESPDIEEKESNDGSNAYNLSPPYRIRSKRTAVFKSRQLEFISPEEEKADDDTKSSEKDKVLDGGDSQLPV

SEQ ID NO: 4486 - protein, 1927 aa, Helicobacter pylori
MNEENDKFETSKKTQQHSPQDLSNEEATEANRFEDSSKESKESSDHHLDNPTETKTNFDEYKSEETQTQMDSGGNETSESSNGSLADKLFKKARKLVDNKRPFTQQKNLDEEIQEPNEEDDQENNGYQEETQMDLIDDETSKKTQQHSPQDLSNEEATEANRFEDSSKESKESSDHHLDNPTETKTNFDEYKSEETQTQMDSGGNETSESSNGSLADKLFKKARKLVDNKRPFTQQKNLDEEIQEPNEEDDQENNGYQEETQMDLIDDETSKKTQQHSPQDLSNEETTEANHFEDSSKESKESSDHHLDNPTETKTNFDEYESEEITNDSNDQEIIKGSKKKYIIGGIVVAVLIVIILFSRSIFHYFIPLEDKSSRFSKDRNLYVNDEIQIRQEYNRLLKERNEKGNMIDKNLFFNDDPNKTLYNYLNIAEIEDKNPLRAFYECIGNGGNYEECLKLIKDKKLQDQMKKTLEAYKDCIKNAKTEEERIKCLDLIKDENLKKSLLNQQKVQVALDCLKNAKTDEERNECLKLINDPEIREKFRKELGLQKELQEYKDCIKNAKTEAEKNECLKGLSKEAIERLKQQALDCLKNAKTDEERNECLKNIPKDLQKELLADMSVKAYKDCVSRARNEKEKKECEKLLTPEAKKKLEQQVLDCLKNAKTDEERKKCLKDLPKDLQSDILAKESVKAYKDCVSQAKNEAEKKECEKLLTPEAKKLLEEEAKKSVKAYLDCVSQAKTEAEKKECEKLLTPEAKKKLEEAKKSVKAYLDCVSQAKTEAEKKECEKLLTPEAKKLLEQQALDCLKNAKTEAEKKRCVKDLPKDLQKKVLAKESVKAYLDCVSQAKTEAEKKECEKLLTPEAKKLLEEAKESLKAYKDCVSRARNEKEKKECEKLLTPEAKKLLEEEAKKSVKAYLDCVSQAKTEAEKKECEKLLTPEAKKKLEEAKKSVKAYLDCVSQAKTEAEKKECEKLLTPEAKKLLEQQALDCLKNAKTEAEKKRCVKDLPKDLQKKVLAKESVKAYLDCVSQAKTEAEKKECEKLLTPEAKKLLEEAKESLKAYKDCVSRARNEKEKKECEKLLTPEAKKLLEEAKESLKAYKDCVSRARNEKEKKECEKLLTPEAKKLLEQQALDCLKNAKTEAEKKRCVKNIPKDLQKKVLAKESVKAYLDCVSKARNEKEKKECEKLLTPEAKKLLEEAKESLKAYKDCLSQARNEEERKACEKLLTPEARKLLEQEVKKSVKAYLDCVSKARNEKEKKECEKLLTPEARKFLAKQVLNCLEKARNEEERKACLKNIPKDLQKNVLAKESLKAYKDCLSQARNEEERKACEKLLTPEAKKLLEQEVKKSVKAYLDCVSKARNEKEKQECEKLLTPEARKFLAKELQQKDKAIKDCLKNADPNDRAAIMKCLDGLSDEEKLKYLQEAREKAVLDCLKTARTDEEKRKCQNLYSDLIQEIQNKRAQSKQNQLSKTERLHQASECLDNLDDPTDQEAIEQCLEGLSDSERALILGIKRQADEVDLIYSDLRNRKTFDNMAAKGYPLLPMDFKNGGDIATINATNVDADKIASDNPIYASIEPDITKQYETEKTIKDKNLEAKLAKALGGNKKDDDKEKSKKSTAEARVESNKIDKDVAETAKNISEIALKNKKEKSGEFVDENGNPIDDKKKTEKQDETSPVKQAFIGKSDPTFVLAQYTPIEITLTSKVDATLTGIVSGVVAKDVWNMNGTMILLDKGTKVYGNYQSVKGGTPIMTRLMIVFTKAITPDGVIIPLANAQAAGMLGEAGVDGYVNNHFMKRIGFAVIASVVNSFLQTAPIIALDKLIGLGKGRSERTPEFNYALGQAINGSMQSSAQMSNQILGQLMNIPPSFYKNEGDSIKILTMDDIDFSGVYDVKITNKSVVDEIIKQSTKTLSREHEEITTSPKGGN

SEQ ID NO: 4487 - protein, 93 aa, Oryza sativa (japonica cultivar-group)
MASSSKASSSSSASAASSEWTKQQNKQFERALAVYDTDAPDRWHNVARYMGGAKSAEEVRRHYERLQADVEQIEAGGVPFSLGYGATPQAGRR

SEQ ID NO: 4488 - protein, 443 aa, Oryza sativa (indica cultivar-group)
MDFSCFQPHSGGCDDMPFDSYVQQNGHQELHLVDHPFNNVTDGHEYYSPSAGGSFLPFATYYDLGHEYYPQGGEKDAVVVDRASPTIRKASPHLPLFTPKSEVSHLIGGGVVGSYKAFEMNSRLIRRKRASGKSLKKANVVKGQWTLEEDRKLVKLVEQFGLRKWSHIAQILPGRVGKQCRERWHNHLRPNIKKDTWSEEEDIVLIQTHKEVGNKWAEIAKHLPGRTENSIKNHWNATKRRQFARRRSRASSKNPKSGTLLQNYIKSLGIGPIKSSVRQAPPESTAVSSSSPASTQKLAEVNGKIRPDSNPSNQMVTQGILTMDENSYIQTNSCEELLVSTYDDLCLDMCDHLFETKDETPYQVYNIDDDVDMNYIFNHIDYANKIGHEIDMEMAWDDDVLQDDESAGSSPLETPAGLAQINTVHVKEEMDLIEMVTRTQSCG

SEQ ID NO: 4489 - protein, 291 aa, Medicago truncatula
MECVKAEAALKSSFNISTAVKLTPQNLLEDLSSFNVQDIAPIDDFFVDDFLNFSNEEQEHEHEQDFLVEKQQNHTPQYTTQNQNQISHPILNNQFVSLPTTELTVPVEEAADLEWLSYFVEDSFSEFPKTENLQLQQKAHEPNPTFSTPCFKTPVPAKARSKRTRTGIRVWPISLANSSSTSSSATLSSSNLEECSKPAEKKAKRMVSPDGEARGVPRRCSHCGVQKTPQWRTGPGGPKTLCNACGVRYKSGRLLPEYRPACSPTFSSELHSNHHRKVIEMRRKKEVVPGF

SEQ ID NO: 4490 - protein, 759 aa, Brassica napus
  misc_feature (680)..(680): Xaa can be any naturally occurring amino acid
KYSRVDGKKSSSYGLTITIVLVVSLCLVGTWMFTSSWSASDDSAGYSSTDTAKDVDSVTKNVAEEKKEDNESVSENNQVKNDPEESSDEKAEVVEERKENDESSEDGEKEKIVKEVESESHESKEKVVKEAESESDEAKEKEKTQLEESTEENKSEDGNNVTEENASETEESTGRVGKEVFPAGDQAEITKETSTKDGSWSTQLVESQNEKKAQESSVPKDQDSVYEWKTCNVTAGPDYIPCLDNLQVIKRLQSTMHYEHRERHCPEESPTCLVSLPEGYKRSIKWPKSREKIWYNNIPHTKLAHVKGHQNWVKMSGEYLTFPGGGTQFKNGALHYIDFLQESYPDIAWGNRTRVILDVGCGVASFGGYLFDRDVLALSFAPKDEHEAQVQFALERGIPAMSNVMGTKRLPFPGSVFDLIHCARCRVPWHIEGGKLLLELNRALRPGGFFVWSATPVYRKNEEDSGIWKAMSELTKAMCWKLVTIKKDKLNEVGAAIYQKPTTNECYNKRPQNEPPLCKDSDDQNAAWNVPLEACMHKVTEDSSKRGASWPNMWPERLETAPEWLDSQEGVYGKPAPEDFAADQEKWKTVVSKSYIDGMGIDWSNVRNVMDMRAVYGGFAAALKDLKLWVMNVVPVDAPDTLPVIYERGLFGIYHDWCESFNTYPRTYDLLHADHLFSTXLRKRCKLESVMAEVDRILRPEGTFIIRDDMETIGEVEKMVKSMKWEVKTTQSKDNEGLLSIKKSWWRPTQTETIESAIA

SEQ ID NO: 4491 - protein, 308 aa, Glycine max
MFGGGGEDALAARLGMMPPSLLNPASVMSGEMSPAVPAAREERGPAQPQWSQQETREFIAIRAELERDFTASKRNKTLWEVVSAKMRERGFRRSPEQCKCKWKNLVNRYKGKETSDPEHGKQCPFFEELHAVFTQRAHNMQRLLLESETRSAHTKKGVKRSSGDRSSEELSEDDNEVEYDSEEEKPSRSNTRKTKVDKVGVEKSSRASNPSNSASNSTSIQEMLKEFFQHQLSMEMQWREMIERRAHERQLFEQEFIKSLKKLERERLMIEQAWREREEQRRMREESRAERRDALLTTLLNKLINESN

SEQ ID NO: 4492 - protein, 258 aa, Glycine max
  misc_feature (229)..(229): Xaa can be any naturally occurring amino acid
MLLVICGRRYRDKALTRSQYFRGIDVNRLPSVVDCEEEAGVSSPNSTVSSVSGKRSERETNGEENDTDRACSRGIISDEEDAETSRKKLRLSKDQSIVLEESFKEHNTLNPKQKLALAKQLGLRARQVEVWFQNRRARTKLKQTEVDCEFLKRCCENLTEENRRLQKEVQELRALKLSPQFYMHMTPPTTLTMCPSCERVAVPPSSAVDPATRHHHVPPSHPRAFPIGXHGQALRCPPSQILDSRKQNDKIEKKDRKP

SEQ ID NO: 4493 - protein, 301 aa, Zea mays
MDTGRKRTAPEGANGAGGPKRARESETTGVGSKSKPCTKFFSTAGCPFGASCHFLHNFPGGYQAVSKMTNLGGPPVPAPPGRMPMGPGGPDGPPSPAVKTRMCNKYNTAEGCKWGSKCHFAHGERELGKPLQMDNPMGPPPMGPGPNGHFMPPPMPFPDMVPPSTFGASATAKISVDASLAGAIIGKGGTNTKHISRVTGAKLAIRDNEADPNHKNIELEGTFDQIKHASAMVTELIVRISGKVPPQAKNNPGRGPGSHAGGPASNFKTKLCENFNKGSCTFGDRCHFAHGESELRKPAAA

SEQ ID NO: 4494 - protein, 499 aa, Oryza sativa (japonica cultivar-group)
MATAAVMAAVPSSSPADAAEAVVMTEAVPSLPQRQQPVFVEGRGGKLRDHAYSRKQKSLGLLCSKWGSLVHLGDSWILAFWFPVLTEFFCAFSSFVALYNRDDVESIGLDDAARRLGVERRRIYDIVNVLESVGVSSFFLRLSWTGFLFFLARFDSDICFRFICEKILVRKAKNRYSWIGFGGVPMALRELKERALREKSGLAPLPVEEPSAAIMSDDEDEDKMGDADGDTESEKLSQPVDNPSDNKPGAPRCRLRSDHRKEKSLGLLTQNFVKLFLTMEVDTISLDEAAKLLLGEGHAENTKVRRLYDIANVLSSLNFIDKIQQADSRKPAFRWLGSAGKPKAENGVTIAVPPPGKTISNKRAFGTELTNIDINRSRLDSTIPKKAKLTLSGGEILKNCKLSVQKQLGQGSKGGFVYGPFHPAGARKQELDNGNKGHTDNVQNWESLAASFRPQYQNQALGDLFAHYVEAWKSWYSEFAQGSSMMQQHFGMPVINQFL

SEQ ID NO: 4495 - protein, 298 aa, Glycine max
RFCGRHKTCNEMAFFPANFMLQTPHHDDHHHHQPPPSLTSILPTCAPQEYHGGVTILGKRSMSFSSGIEHGEEANNAEEDLSDDGSQAGEKKRRLNMEQVKTLEKSFELGNKLEPERKMQLARALGLQPRQIAIWFQNRRARWKTKQLEKDYDVLKRQYEAVKSDNDALQAQNQKLQAEILALKSREPTESINLNKETEGSCSNRSENSSDIKLDISRTPAIDSPHSTHQQQPSRPFFPPSSVRPAGVAQLFQTSSRPELASCQKIDQMVKEESLSNMFCGMDDQSGFWPWLEQQHFN

SEQ ID NO: 4496 - protein, 606 aa, Oryza sativa (japonica cultivar-group)
MDSEDDMLDANDSADDDFYSGGEAGLGGSDDGDADYDFADHDSDDSAELLSHRQQKNNGNSMGVLFGRVGSGDINSWDKDSLQEIGYGITVNELWIYPYPYHTETTAIIRKGSRSHEDEQNYSILSEADIQQRQEDDINRVSTVLSISKSEACVLLRNYNWSVSKVHDEWFADEEHVRKVVGFPEKLIEMPNDRECMLERFDNLTLRYFSLSTPDSVLCGITTYIVHIDRCPDPSCTAAVGQDMINSLADDEDREKYGRYLRRSYIEDNRKTKWCPAPGCEYAVEFVMGSGSYDVNCNCSYGFCWNCTEEAHRPVDCATVSKWILKNSAESENMNWILANSKPCPKCKRPIEKNQGCMHITCTPPCKFEFCWLCLGPWSEHGERTGGFYACNRYEAARQEGAYDESERRREMAKNSLERYTHYYERWAANQSSRQKALGDLLSLQNDKLEKLSDIQSQPESQLKFIIEAWLQIVECRRVLKWTYAYGFYLPEHEHAKRQFFEYLQGEAESGLERLHQCAEKELQVYLEAESPSKDFNDFRTKLAGLTSVTRNYFENLVRALETGLNDVGPSTSHGTCSKSATSKSLGSKNLPETARLVTTSIDSIT

SEQ ID NO: 4497 - protein, 298 aa, Glycine max
DMDRIKGPWSPEEDEALQKLVEKHGPRNWSLISKSIPGRSGKSCRLRWCNQLSPQVEHRAFTAEEDDTIIRAHARFGNKWATIARLLHGRTDNAIKNHWNSTLKRKCSSTMIDDNTQPLKRSVSAGAAIPVSTGLYMNPPTPGSPSGSDVSESSLPVASSSHVFRPVPRTVKVLPPVETTSSSNDPPTSLSLSLPGVGVVDSSEVSNRTTEPIHFTPPMPHRSNTMPLLPMMTSVSATVMAPFNFSAEFRSVMQEMIRKEVRSYIELHNQNGMCFQAAVNDGFRNASVKRIGISRVDS

SEQ ID NO: 4498 - protein, 246 aa, Arabidopsis lyrata subsp. lyrata
MLKSVSPIAFYDIGEHQQYSTFGYIVSKPGNAGAYEIDPPIPNIDDAIYGSDEFRMYAYKIKRCPRTRSHDWTECPYAHRGEKATRRDPRRYTYCAVACPAFRNGACHRGDSCEFAHGVFEYWLHPARYRTRACNAGNLCQRKVCFFAHAPEQLRQSEGKHRCRYAYRPVRARGGGNGDGVAMRMDGEDYDTSRSPVRSGKDDLDSNEEKVLLKCWSRMSIVDDHYEPSDLDLDLSHFDWISELVD

SEQ ID NO: 4499 - protein, 330 aa, Brassica napus
  misc_feature (163)..(163): Xaa can be any naturally occurring amino acid
MFGQSFPEDIDCGNFFDNMDDILDFPGCDMDVGFNIGDSDSFPNIWTNHQDTWPAASDPLFSSNTNSDSSPELYVPFEDIVKVERPASFVSESLVAKKEDSFSTNTDSSSSHSQFRSSSPVSVLESSSSSSQTTNATSLVLSGKHGRPRTKRPRPPVQEMDRXNVCGADSRLIVRIPKQFLSDHSKMITKKKKKKAKVTSSYSSSGIDLETNGSNNNNNVDSYGSDQHPVRKCMHCEVTKTPQWRLGPIGPKTLCNACGVRYKSGRLFPEYRPAASPTFTPALHSNSHKKVAEMRSKRCKDGSYTTEENDMQDLIPNNAYTGVDLKPRER

SEQ ID NO: 4500 - protein, 273 aa, Nicotiana tabacum
MTLEALKSPTAATPTLPPRYEDDDEIHNLDSWAKGKRSKRPRIDAPPTEEEYLALCLIMLARSGTGTRTGLTDATTSQQPADKKTAELPPVHKKEVATEQAEQSYKCSVCDKAFSSYQALGGHKASHRKTTTTATAASDDNNPSTSTSTGAVNISALNPTGRSHVCSICHKAFPTGQALGGHKRRHYEGKLGGNSRDLGGGGGGGHSGSVLTTSDGGASTHTLRDFDLNMPASPELQLGLSIDCGRKSQLLPMVQEVESPMPAKKPRLLFSLG

SEQ ID NO: 4501 - protein, 559 aa, Oryza sativa
MSSAYTVHRSISLLSVIQLNNSSQWRAERIKQQIKVHFCANRLAHRKLFVASLSFEKDMTGNKSFMEPRFFGPKVLRQAKHPMRHAVHHFFTFLFDYKYSVIRVLQNENDVGHVFRALAKFKSLLLDVVRKKRAPTRGGGGKKYAIGYRSRPEKSKKRIASFMKLLHFNWAAAAAVTPARAKDLELHYHPYYYDYDDSTWNVVVPADGAAEELRGGGGDDGEDCGYLCWLEEETSAGALPAAGEGEDGGNGNGDGDGNGAVNEIDRLAERFIARCHAKFLLEKQESYRRYQEMMARSITIGCPFGEGCHFSHFVPGGYQAVAKTLNLGNPAVPAPARAPMDHAAGGNSHPASSGKTRMCTKYNTAEGCKFGDKCHFAHGERELGKPAYMSHESAMAPPMGGRYGGRPEPPPPAAMGPPAGNFGASATAKISVDASLAGGIIGKGGVNTKQICRVTGVKLSIRDHESDSNLKNIELEGNFDQIKQASNMVGELIATISPSTPAKKPAGSAAGAAPAGRGGPGGRSNYKTKLCENFVKGTCTFGDRCHFAHGENEQRKGAA

SEQ ID NO: 4502 - protein, 270 aa, Oryza sativa
MGRGRIEIKRIENTTSRQVTFCKRRNGLLKKAYELSVLCDAEVALIVFSSRGRLYEYSNNNNVKATIDRYKKAHACGSTSGAPLIEVNAQQYYQQESAKLRHQIQMLQNTNKHLVGDNVSNLSLKELKQLESRLEKGIAKIRARKNELLASEINYMAKREIELQNDNMDLRTKIAEEEQQLQQVTVARSAAMELQAAAAAQQQQQNPFAVAAAQLDMKCFFPLNLFEAAAQVQAVAAQRQQIIPTELNLGYHHHLAIPGAAAADAPPPHF

SEQ ID NO: 4503 - protein, 130 aa, Yarrowia lipolytica CLIB122
MQEVEFLNSSFQKLIEAKRKFQDCQESVRGVSAEKDDTELMVPLSSSLYVPGRMSNVGKFMVDVGTGYYVEKDAEGAIAHYQKKVMTLEKNLGDLTAVAEQKGKNLEAIDQIMRQKIGEEMKKKQTQQAE

SEQ ID NO: 4504 - protein, 269 aa, Oryza sativa (japonica cultivar-group)
MSCHGGGGGGGEGALSRQGSVYSLTLNEVESHLGEPLRSMNLDDLLRTVLPAAAAAAETAGRKTVDEVWRDIQGASTGRHHATPMGEMTLEDFLSRAGVAVDGAASAAGAHWLRGHYPPPPPPTTTTLQYVGGSGAVVDGVYNRVDGHGVAGFLSQVGVAGRKRGGGVDGVVEKTVERRQKRMIKNRESAARSRARKQAYTNELENKISRLEEENQRLREHKAVADFSTFPSCVDFLKAFLTQKLEPVMQIVPQPEPKQQLRRTTSASF

SEQ ID NO: 4505 - protein, 1062 aa, Oryza sativa (japonica cultivar-group)
MPPPTVPFFLTSTTLAAAAAKPQRPGPPSPPAQKQQPREARDGSRDACASYTRAHAAQPRSLGSACSTTCSGSGADPDHVAYALALGRCARGRDRRAAAQLHAHAAKRGAASHRRVCNGLIHAYAVCGSLLDARKVFDRGHEGDAVAWNSLLRGYAAAGDVNALREFFVGMQARDTVSWNTIIAWCVENGEYEEAIAVFREMLASMECLPDRVTLVSVISAITYLGALAQGLWAHAYVCRKGIEVEERLSSALINMYSKCGCIEGAVHVFENLGAQMNVDTWNAMLAGFTANGCSEKALELFARMEITGLVPNKITFNTVLNACSHGGFVEEGMGCFERMTKVYGIEPDIAHYGCMVDLFCRAGLFDKAEKMIQMMPMKPDAAVWKALVGACKTHRNFELGRKAGHMLIEAAPNDHAGYVLLSNIYALDGNWTGVHKVRKLMLDRGVQKVPGSSSIEIDGVIHEFISGDKSHSSKEDIYEMLSEMCQQLKVAGYVPDTSHVLLDIDDEDVKESSLALHSEKLAIAFGLISTAPGTPIRIAKNLRVCGDCHNAVKLLSKIYGRNPLLLLAPDGPLPTARLLEKASSRADKQMPVRVGSVRDANMLCSAGYYYALGIRSLEPRLGDSMDMSESSEKGMESNASSGPGNGIPVEWQSQFSSAFACQPSVAAQHQQHAMMDSFAAASAGLWASSDVVSAMSSAAPPRGAGFLAPVPGFLQQGLGHFPVDSGFIERAARSTCFGGGMMAGGPYGAADQAMGDAFGGTAEGLMDHHRNVGNDKAEEFAGNGHDEVPSSEVAGGDCSSKGSDSKKRRRPNEVMGTDQVHSSNLPSDSANESVHSKDKGEESSPATTNGGKSKGKGAKETSESQKEEYIHVRARRGQATNSHSLAERLRREKISERMKLLQDLVPGCSKVTGKAVMLDEIINYVQSLQRQVEFLSMKLATVNPRLDLNIEGLLSKDLLRFPGVPSSSIGFSPEMMHPQLQLSQPGLIHGGTAGMANPDVFRRIIQAQLGAKDGSQASHQLPNIRIKFSQNHQNSQSISPTSLQIHLRITSDILHSENPVH

SEQ ID NO: 4506 - protein, 831 aa, Ustilago maydis 521
MTVSHRKNKPAPKTEDGSTSAAAEPGVRYHCDACGADITLTVRIRCAGGCTDFDLCASCFCSGAQPGKHKAWHDYRVVEQHSYPIFCDDWGADEELLLIDGCQTYGLGNWADIADHIGNRTKDEVQEHYIKVYVEGRDGTQPGEQRADQAIQRYHHVAKPVFDPLFDDSGTGSRVACQLTTQEPPVVGPSMSFAPSISQDEFQRRKRRRVETLREAQASYSPPKSAKPLVSAPTNHSELVGFMPGRLEFEHEYEQEAEHLIKDIEFGRVYEFGGADMPSEWEALGSKATQGHARMEASGRGGPTSKKATQNAAEDDKEGNADEDADEHSAADAKEKDKDKDAEPEDKPFDWDEDPTDLHLKLTVIDMYNERLDRRLRRKHFMFERNLVDYRRNQAAERRRPKEEKELLSRTKHFAQMQTALDYEDFLNGLCYEEALRKAAAQLQHYRKMGILTLDDASAYEREKAERARRAAELAAGGLAVFPASGAAATPGPPSARPRIDAARARQRDTSTPTPMEETPTAQQATAASSASATTAANGKESKKDKDAKDKDGKVDKGKKGGNSDEPKTPRKPPQPLNLAKAPSLNLLTPAEAQLCSALRILPQPFLLIKSTLIAEFIARGGRLTRRECRTLVKIDVNKLGKVWDFFNEMGYFDAAREAGWTGGIGSPPRSKDKEVKKPGWLDSNMAMSASYSFAPTAANGVNGVHRGGTADPMNDSASAANSRGGLFGRAFGTSAAASNSGGLFDLAHSSSNVTSTQHQQALLNYNGRGAPLVSIPGTAANGVHASSSSTPSGGVSGDGGGGAASSSMATGRAASQSPSKAEKYRPTAAV

SEQ ID NO: 4507 - protein, 338 aa, Glycine max
  misc_feature (48)..(48): Xaa can be any naturally occurring amino acid
  misc_feature (334)..(334): Xaa can be any naturally occurring amino acid
MESEDDMHDANDIESLDDDFYSGETEDAPLDYYSDDDADDYFDDAEDXSRRPEQNFTILKESDIRLRQEDDVARVATVLSISRVSASLLLRHHNWSVSRVHDAWFADEERVRKAVGLLEKPIVQHPNARELTCGICFENYPRARIEMASCGHPYCISCWEGYISTSINDGPGCLMLRCPDPTCGAAIGQDMINLLVSDEDKQKYARYLLRSYIEDNKKSKWCPAPGCEYAVTFDAGSAGNYDVSCFCSYGFCWNCTEEAHRPVDCGTVAKWILKNSAESENMNWILANSKPCPKCKRPIEKNQGCMHMTCTPPCKFEFCWLCVGAWSDHGERTXWFYA

SEQ ID NO: 4508 - protein, 273 aa, Solanum phureja
MPIEALKSPTAALPPLEEIDDSHNLDSWAKGKRSKRPRIDNPPTRDQYLALCLLMLANDDGTGFGKGKGKGTGSIDVVIEQQQEKKLKPVFIKEKTEQLFKCSECPKVFTSYQALGGHKASHRKINVTATGDDDNNPSTSTSTSGGVNISALNPSGRSHVCSICQKAFPTGQALGGHKRRHYEGKLGGNNRYISGGGCGEGVHSGSVVTTSDGGSGNGGAASTPIARDFDLNMPALPGWQLDLTIDCGGRSQFPIEQEVESPMPAKKPRLFFD

SEQ ID NO: 4509 - protein, 449 aa, Zea mays
  misc_feature (271)..(271): Xaa can be any naturally occurring amino acid
MGRSRGVLSSGDDDTGHRSKRRRVSSGGDATDSISASIGGAGEGGGKKALYHCNYCNKDISGKIRIKCSKCPDFDLCVECFSVGAEVTPHRSNHPYKVMDNLSFPLICPDWNADEEILLLEGIEMYGLGNWLEVAEHVGTKSKLQCIDHYTSAYMNSPCYPLPDMSHVNGKNRKELLAMAKVQGESKKGTLLLPGELTPKVESQFSPSRVKVEDALGEGPAGRSPSHMAVGANKKASNVGHIKDGATVSKVEEICFLKNVFFCNLSSIKKXNGDSLTLRHDVHVDRSVGVKKPRYSADEGPSLTELSGYNAKRHEFDPEYDNDAEQALAEMEFKETDSETDRELKLRVLRIYLSRLDERKRRKEFILERNLLFPNPLEKDLTSEDRELYHRYKVFMRFLSKEEHEALVRSVIEERKIRRRIQELQECRSAGCRTLAEAKIHIEQKKKKK

SEQ ID NO: 4510 - protein, 244 aa, Medicago truncatula
MSTTNIVNHHSLFDQEQDHEIPMQMGFNIPFPPNMTLPPLDNCHHQSLKGISAITPSSLSPEAANFAETLLATAVQKTREFDDHLTSSFGGGGQLLSLNRSKVNSWAWGEVTGSLIGKRSSGGDDQHHHHHNQQLGVSAIKMKKMKGRRKVREPRFCFKTMSDVDVLDDGYKWRKYGQKVVKNTQHPRSYYRCTQDNCRVKKRVERLAEDPRMVITTYEGRHAHSPSNELEESQTQSELTNFFW

SEQ ID NO: 4511 - protein, 428 aa, Lemna paucicostata
MSFRSILSDVRDSIGSFSRRRGAEVRISGVSDNHRGRNRVTAGDFPGEIGGEIPAIYQSRWAGLPPELLRDVIKRLEESESSWPARKHVVACAAVCTAWREMCKEIVSGPEFCGKLTFPVSLKQPGPREGTIQCFIKRDKSKSRYHLFLGLSPTLPAENGKFLLSQSASRALPARNTSSPWNADDISRSSSTYIGKLRSNFLGTKFIMFDTQPPTRHCRPAPSSGRVSRRFYSKVSPKVPSGNYAIAQVTYELNVLGKRGPRRMHCTMNSIPSSALDAGGRVPAAPERILSRSLEDSFRSVSLSKDLGSSRFSEFGGEMEREEEEEGDRKKSGPLVLKNKAPRWHEQLQCWCLNFRGRVTVASVKNFQLIADGQATAAQAGASEHDKIILQFGKVGKDTFTMDNRYPLSAFQAFAICLSSFDTKLACE

SEQ ID NO: 4512 - protein, 246 aa, Boechera stricta
MLKSASPLAFYDIGDQQYSTLGYIVSKPGIAEAYDLDHPIPTINNAIYGSDEFRMYAYKIKRCPRTRSHDWTECPYAHRGEKATRRDPRRYTYCAVACPAFRNGACHRGDSCEFAHGVFEYWLHPARYRTRACNAGNMCQRKVCFFAHAPEQLRQSEGKHRCRYAYRPVRARGGNGDGVAMRLDGEDYDTSRSPEKSGKGDLDSNEEKVLLKCWTSMTIVDDHYQPSDLDLDLDLSHIDWISELVD

SEQ ID NO: 4513 - protein, 318 aa, Arabidopsis thaliana
MGERDDGLGLSLSLGNSQQKEPSLRLNLMPLTTSSSSSSFQHMHNQNNNSHPQKIHNISWTHLFQSSGIKRTTAERNSDAGSFLRGFNVNRAQSSVAVVDLEEEAAVVSSPNSAVSSLSGNKRDLAVARGGDENEAERASCSRGGGSGGSDDEDGGNGDGSRKKLRLSKDQALVLEETFKEHSTLNPKQKLALAKQLNLRARQVEVWFQNRRARTKLKQTEVDCEYLKRCCDNLTEENRRLQKEVSELRALKLSPHLYMHMTPPTTLTMCPSCERVSSSAATVTAAPSTTTTPTVVGRPSPQRLTPWTAISLQQKSGR

SEQ ID NO: 4514 - protein, 241 aa, Triticum aestivum
MSCGGVGQGGWLLDYGLVEEEIQASDFIYMVDDPPVSSVILGFDAPRREDAAAAAQDNSGAKKRSRPESSAQPGTKACREKLRRDRLNERFSELCAVLEPGKPPKADKVAILSDATRLLDQLRAEAQKLKASNESLQDSIKSLKSEKSELRDEKTQLKAERERLEQMLKGVSAAAAAPRQYVPHPAAAAAPQFHPAAAYAHAGKFVPAYAAGYPPPAAFWQWIPPTSLDTSKDPAHWPPVA

SEQ ID NO: 4515 - protein, 129 aa, Glycine max
  misc_feature (4)..(4): Xaa can be any naturally occurring amino acid
  misc_feature (25)..(25): Xaa can be any naturally occurring amino acid
  misc_feature (57)..(57): Xaa can be any naturally occurring amino acid
KLSXHMLHYVNTTGSGQQTLGEGGXDMTEGAGPYGLTATLARRALLAEYHAGVPYIXKELPVGIGTRGIGLADYESPEGFGENAHRSHSAHIAGTSASFRDGQSDTTLARVKGKMSAFWGHLVHRWPTM

SEQ ID NO: 4516 - protein, 293 aa, Zea mays
MSGAGPDLQLPPGFRFHPTDEELVMHYLCRRCADLPIAVPIIAEIDLYKFDPWQLPRMALYGEKEWYFFSPRDRKYPNGSRPNRAAGAGYWKATGADKPVGTPKPLAIKKALVFYAGKAPKGEKTNWIMHEYRLADVDRSARKKNSLRLDDWVLCRIYNKKGGGLEKAPAAGGDHKPMFATPAVSSPPEQKPFVAAAGGLPPAFPELAAYYDRPSDSMPRLHADYSSCSEQVLSPEQLACDREVQSQPKISEWERTFASDPVNPAGSMLDPVVGHAGGDPLLQDILMYWGKPF

SEQ ID NO: 4517 - protein, 319 aa, Oryza sativa (indica cultivar-group)
MGCKSCEKPRPNYRKGLWSPEEDQKLRDYILRHGHGCWSALPAKAGLQRNGKSCRLRWINYLRPGLKHGVFSPEEEETVMSLHAALGNKWSRIARHLPGRTDNEVKNYWNSYLKKRVESGGGKTSQGPPTTPASAASSPADSDDSHSLQQKPHEPANSDSSEPAHESSSASADSSCLTVTTDHPPVSRPHAAVTPKVMFADWLDMEYICGQVAAAPGLDAAGFAVVGGAAGDQQQQQQQVMSQDGSVHQADGPSCGVDDSSLQQQQQEGFGGNGGCWDFQEQFDSIDQMQASGGGGGGGFCDLLSMSDFDLWAELERTA

SEQ ID NO: 4518 - protein, 300 aa, Oryza sativa (indica cultivar-group)
MGRAPCCDKKGLKKGPWTPEEDKLLVDYIQANGHGSWRLLPKLAGLNRCGKSCRLRWTNYLRPDIKRGPFTAEEQKSIVQLHGIVGNKWSMIAAQLPGRTDNEIKNYWNTHLKKQLRRMGLDDPPPGPAAGCPAARHMAQWETARLEAEARLSLLSSSGAAATTTITAATTTTSTSSSSTTAGPVAAAATSPADVFLRLWNSSIGDSFRKLAVVAAGSSSPSRADVTKDAVKQEEEAAPAGDDSSAASNEVEAATMAVDEYQMFLDFAGEELGLFHGRYGGFSLFPPVDLLEASLETAFK

SEQ ID NO: 4519 - protein, 251 aa, Oryza sativa (japonica cultivar-group)
MVGMMETSPDDGGGGEAMAAAQQTEEDMGPPWLRPLLSTSFFVACASHPELSKNECNLFCLGCTGDALCAYCLPAHRDHHVIRRSSYHNVIRVSEVGKLIDISHVQTYVINSAKIVFLNGRPQARPGKGVTNTCEICCRSLPDSFRFCSLGCKLGGMRWDPSLTFAIRPKRGQDSGDGGSGSDYDSFSPKKARRAAAGYDQLGRFDRGMIRWSDDEGSKSNTAPITPTTPPISRCRPSRRKGIPHRAPFYG

SEQ ID NO: 4520 - protein, 208 aa, Boechera stricta
MATIEESSDLEAIQKHLFEDLMVSDGFMGDFDFDASFVSELWCIEPQVPKQEPDSPVFDPDSFVNEFLQVEAKSSPELNSSSSTYETDLSVKKAERFEEEEEEEEEEARHYRGVRRRPWGKFAAEIRDPAKKGSRIWLGTFESDVDAARAYDCAAFKLRGRKAVLNFPLEAGKYEAPANSGRKRKRSDVKEELQRTQSNSSSSSCDAF

SEQ ID NO: 4521 - protein, 563 aa, Oryza sativa
  misc_feature (293)..(293): Xaa can be any naturally occurring amino acid
MAALDAARSSRRMDLNLYLGLPRAPRLRRPDLGSDLALGTPMLSSSPSSSAASADAPPLETEPLHPPYSPPPAELVRPPTPLPEPYDPSAPEAHPPYVPPPVPPPEAIPELADDLEFGFSHPPLLLRPSELLGWVDRPSSSTASSSFRPERVDRYRPPVICLNSRQSRCLRPRRFRSDLPPLGSEAPALENDAAAQPPPQEPMQDTVEENKVVADGAIVGASEEEPAERGKSVAMFECNICFEMASEPVVTSCGHLFCWPCLYQWLHVHSTHKECPVCKGEVTEGNITPIYGXRGNSTSDAEKKVAEEGNVSGPTIPPRPHGNRLESFRQKFHHLRPISRRLGEAHGILSSWRRILDQQIMNSVSRFEGPPESTVQEMIDHAHHASRLGRITTRMRARRLQREAENSTFVASSAAESGLPANSTSDLPRRSSSPFSSERIDLLQHFVDLASTERLASAVSDLRRMVRPSPYGASTSSNPPNPPNTELLPVDGNHVAVALAADQASNSSTMAVIQEDAAFTESTGEPSNAGSSRSLRRRGRNDALGSLDVDGVGLHRNKRRRLN

SEQ ID NO: 4522 - protein, 242 aa, Triticum aestivum
MVMVSVQQSPMVRSEEDLGPPWLRPLLGTSFFVPCPAHPDLSKNECNFFCLGCNHAAGALCSYCVPAHRDHHVVQIRRSSYHNVIRVSEVGKLIDIAHVQTYVINSAKIVFLNGRPQARPGKGVTNTCEICCRSLPDSFRFCSLGCKLGGMQWDPTLTFAIRPKRSQDSGGEGYGSEDDSFSPRKQLRRAGFELGRFDRSVRWSDDEGSKSNTRPMTPTTPPISRCRPSRRKGIPHRAPFYG

SEQ ID NO: 4523 - protein, 282 aa, Triticum aestivum
  misc_feature (107)..(107): Xaa can be any naturally occurring amino acid
  misc_feature (136)..(136): Xaa can be any naturally occurring amino acid
MAGQPPQGPEDDFLDQFFSLTNSLSAAGRPSGDQPFSLALSLDAASDACGSRGGIGDDPGHAAERDGVQLPGLFPPVFGGGLQPPHLRPSHPPPQMFHAQQPKQGGXAGGPQPPAPRPKVRARRGQATDPHSIAEXRLRRERIAERMRALQELVPNTNKTDRAVMLDEILDYVKFLRLQVKVLSMSRLGGAGAVAQLVSDIPLSVKGEASDGGSKQQVWEKWSTDGTEKQVAKLMDEDIGAAMQFLQSKALCMMPVSLAMAIYDTQHSQDGQPVKPEPNNTA

SEQ ID NO: 4524 - protein, 244 aa, Liquidambar styraciflua
LATTEFPNQSSEGSSSQKKMGRGKIEIKRIENTTNRQVTFCKRRNGLLKKAYELSVLCDAEIALIVFSSRGRLYEYANNSVKSTIERYKKASDTSNPGSVSETNAQFYQQESSKLRRQIRDIQNLNRHIMGEALSSLTFRELKNLEGRLEKGISRIRSKKNELLFAEIEYMQKREIELQNANMYLRAKIAENERNQQQTELMPGSVYETMPSSQPYDRSFLVANLLEPPNHHYSRQDQTPLQLV

SEQ ID NO: 4525 - protein, 329 aa, Brassica rapa
MPRPFFHKLIFSSTIQEKRLRVPDKFVSKFKDELSVAVALTVPDGHVWRVGLRKADNNNKIWFQDGWQEFVDRYSIRIGYLLIFRYEGNSAFSVCIYNLPQSEINYHSTGLMDSASHNNHFKRPRLFEDLEDEDAETLHTTASAIQSFFTGPVKPEEATPTQTSKVPKKRGRKKKNADHPEEVNSSAPRDDDPESRSKFYESASARKGTVNAEERERAVNAAKTFEPTNPFFRVVLRPSYLYRGCIMYLPSGFAEKYLSGISGFIKVQLGEKQWPVRCLYKAGRAKFSQGWYEFTVENNLGEGDVCVFELLRTRDFVLKVTAYRVNEYV

SEQ ID NO: 4526 - protein, 252 aa, Capsicum annuum
MNQDMALEQLDTTFNKHDTPLGKWKSMNDEVEENISGGFDCNICLDCVHEPVITLCGHLYCWPCIYKWIYFQSVSSENSDQQQPQCPVCKAEVSEKTLIPLYGRGGQSTKPSEGKAPNLGIVIPQRPPSPRCGGHFLLPTTDSNPSQLLQRRGYQQQSQTRQPAYQGSYMSSPMLSPGGATANMLQHSMIGEVAYARIFGNSSTTMYTYPNSYNLAISSSPRMRRQLSQADRSLGRICFFLFCCFVTCLILF

SEQ ID NO: 4527 - protein, 165 aa, Triticum aestivum
EPEAEAAAVPVGAAGGGQRKRRRKKNVYRGVRQRPWGKWAAEIRDPRRAVRKWLGTFDTAEDAARAYDLAALEFRGPRARLNFPCSDEPLRVHGSGNGGDGDAGAAPQNETLTTPSPCSTDAGQRTPGQWQLAADGAGDQLWEGLQDLMTIDGEGPWFAPFSSPA

SEQ ID NO: 4528 - protein, 240 aa, Brassica napus
PKEKRKKIEKKLLKGKKKQYSQSTMSSSPSSWSSSQESFFWNESSLLDHSSDHPSFFCPNYNYSDYFFSFESPEPMIKEETQNGDVSNSEEEEKIGTIDEGKSYRGVRKRPWGKFAAEIRDSTRNGVRVWLGTFDEAEEAALAYDQAAFATKGALAVLNFPVEVVRESLKKMENVNLQDGGSPIMALKRKHSLRNRPRGKKRSSNSSSCSSNSSSYSSSSSTSWSSSSTSRGNEQSVVKQ

SEQ ID NO: 4529 - protein, 350 aa, Nicotiana tabacum
MDPKFSGKPIPIPFLAGRTDLDQMPDTPTRIARHRRAQSETFFRFPDFDDDILLDDVVADFNLDISAPSLSPSADTHMQPANSADSSSTGGPGLMSGPGANNNPRPLNHFRSLSVDADFFDGLEFGATTPGAAAEEEKKVFGSSSVSGSGTRHRHSNSMDGSFSTASFEAECSSSVKKAMAPDRLAELALIDPKRAKRILANRQSAARSKERKIRYTSELERKVQTLQTEATTLSAQITVLQRDNSGLTNENKELKLRLQALEQGAHLRDALNEALREELQRLKIAAGQILGANGNRGPRPHFPPQPQSFVQCGSHHAQQQQQHMPHSTTSTQNIGGQTQPSFMNFNNRG

SEQ ID NO: 4530 - protein, 286 aa, Zea mays
MHIREEEATPSTVTGIMSTLTSAGQQKLKEPMSPGGGSASVAGSAAERNNGGRGKGKTEIKRIENTTNRQVTFCKRRNGLLKKAYELSVLCDAEVALIVFSSRGRLYEYANNSVKGTIERYKKATSDNSSAAGTIAEVTIQHYKQESARLRQQIVNLQNSNRALIGDSITTMSHKELKHLETRLDKALGKIRAKKNDVLCSEVEYMQRREMELQNDNLYLRSRVDENERAQQTANMMGAPSTSEYQQHGFTPYDPIRSFLQFNIVQQPQFYSQQEDRKDFNDQGGR

SEQ ID NO: 4531 - protein, 332 aa, Oryza sativa (indica cultivar-group)
MDVEFFADLDLDALLASFSSSAAAAGSGVSGLFAPSPPHDAEAGSPESVSSRRPSPSREAALSEIERFLMEEGPAAEEGVGAEDFFDALLVDGGEEEEEEEGKGSEAGGSTDGDSGKENEVATPDAEKEDVEAEVDGDDPMSKKKRRQMRNRDSAMKSRERKKMYVKDLETKSKYLEAECRRLSYALQCCAAENMALRQSLLKDRPVGAATAMQESAVLTVCLSHNPDAPTVYLCHKPDAKGNLFLFAETLPLVSLLWLVSIVCLLLVPGLPNRNPVARSSAGRDLATVTGKKTSSEQQLEETLLLHGRRCKGSRARIKLDTGPFRLAAAAC

SEQ ID NO: 4532 - protein, 306 aa, Musa acuminata
MSGESSEPYSHDFPFHDDLFSVFSQKPDGLQGFDPQTAPPFMSFGDYLHGSTTDGSLVVQGFDAPRSQPCDPVVGGDGGKNAAAGGGDGMTPVTPNFSASSSSTEAAGDEDWRPCKVDQPKQEVQEEEKHAPQDGEGRDKTKKANKPRKKGERQRGPRFAFMTKSEVDHLEDGYRWRKYGQKAVKNSPYPRSYYRCTAQKCNVKKRVERSCQDPTTVITTYEGQHTHHSPASLRGGGGGHMLSPSPTTNLRRSLLLQQVSRSSSSAGYTNPNTYHAGLPPLLPQLHVPDHGLLQDIVPSFTHGSQR

SEQ ID NO: 4533 - protein, 229 aa, Oryza sativa
MAPGGGVLFAGTSVCSEEGQDEDEETIVESRAFEQRVNFWEQPNQRWGRLGRGTAEPGHGGPAQVLASSGRHVMMRCVGRDGDDGLRRSENVAAEIVEEEKPSPLNALNRLRLSSSFAPPLLSSSRADGGRGEAARPSRRHAPALSMGSSWTLDQNKVFELALATYGKDTPDRWENVARAVGGGKTADDAKRHYKKLENDIGRIDSTGASSSNSNGRSSSEGQRYLKPQ

SEQ ID NO: 4534 - protein, 210 aa, Solanum lycopersicum
MAMVNLNGISKEVHYRGVRKRPWGRYAAEIRDPGKKSRVWLGTFDTAEEAARAYDNAAREFRGAKAKTNFPKLEMEKEEDLKFAVKNEINRSPSQTSTVESSSPVMVDSSSPLDLSLCGSIGGFNHHTVKFPSSGGGFTGSVQAVNHMYYIEALARAGVIKLETNRKKTVDYLGGGDSDSSTVIDFMRVDVKSTTAGLNLDLNFPPPENM

SEQ ID NO: 4535 - protein, 239 aa, Oryza sativa
MASALAALPKSSPDCAVCLSPFAPEAELRLLPACRHAFHASCVDAWLRTTPSCPLCRATVSLPHPPLPTAAAAAASNAAQQDPLDSRSSNNSRSFRVEIGSISNRRSSAAADDRRTYSLGSFDYRVDEEVEAVVSRIARPAAAKSTTGSVTPAPGEALAEAAGSRGWLREYVDRLASSASSLSGRWSGRWSARWSQSHHSNRQEDSWRWDPEAAVMSAPRGVDDDEPGFVTLYRWIVGV

SEQ ID NO: 4536 - protein, 267 aa, Zea mays
MEQTRTGGAGEQPRGAPGEEAAKRIIVGGDAPASGTSGSGCFDCNICLECATEPVVTLCGHLYCWPCIYEWLRHDVAEAGARSSARRQCPVCKAAVSPDALVPLYGRGGSSSAKKPLASIPRPRRPALRQSTHDSGSGGHHHHHRHAETSTPARSLRHPAHAHAAQFDALLSAPFGDRGMLHSTTSTTGGMLGGMAVAVLPLVLRGQARVPGMYYPSPYHLMSPRQRRWHVEDTILRLRATRRALYIAKGEIWIWCWCGSDLYLVIA

SEQ ID NO: 4537 - protein, 239 aa, Oryza sativa (japonica cultivar-group)
MSREEDEKLLFPSFAFPAECFPEAATSGGEQKKARQRRRRKVKPEAAAALAGESGGDEQAKKRRLSDEQARFLEMSFKKERKLETPRKVQLAAELGLDAKQVAVWFQNRRARHKSKLMEEEFAKLRSAHDAVVLQNCHLETELLKLKERLADVEEEKAKLAAVAAATTGGGGGGGGGSSSPTSSSFSTVTYHPALAGQFGVEAAAEEADLTYMSEYAYNSYMLELAAAGYCGGVYDQFS

SEQ ID NO: 4538 - protein, 255 aa, Prunus persica
MGRGSVQLKRIENKINRQVTFSKRRSGLLKKAQEISVLCDAEVALIVFSTKGKLFEYSTDSCMERILERYERYSYSEKQLLANDHESTGSWTLEHAKLKARVEVLQRNCSHFMGEDLQSLSLKELQNLEQQLDSALKHIRSRKNQVMYESISELQKKDKALQEQNNLLAKKVKEKEKALAPQAESWEQQVQNQGLDCSSTLLPEALQSLNFGSGSNYQGIRNDGSGGDHEDENETPTANRPNTLLPPWMLRHLNE

SEQ ID NO: 4539 - protein, 142 aa, Brassica napus
MSNNNDGALVVKKPPAKDRHSKVDGRGRRIRMPIICAARVFQLTRELGHKSDGQTIEWLLRQAEPSIIAATGTGTTPASFSTVSASLRGNSTTTSCNLSSSLDHKPLLGVSPFILGKRVRADEDTPSGFWAVPARQEFGQVW

SEQ ID NO: 4540 - protein, 193 aa, Glycine max
  misc_feature (107)..(107): Xaa can be any naturally occurring amino acid
  misc_feature (109)..(109): Xaa can be any naturally occurring amino acid
  misc_feature (128)..(128): Xaa can be any naturally occurring amino acid
GFLCNLLYSKLVPSSGSRSTDTRKRGRPEPGFSLNGGFKRSKQEMESLSTGVGSKSKPCTKFFSTAGCPFGEGCHFLHYVPGGYNAVAHMMNLTPAAPPPPSRNVAXSXPVPNGSAPPAVKTRICNKXNTAEGCKFGDKCHFAHGEWNLQHIAHHLMTMPGPLTAGDGPRSVGALLRLMGGTKHQLFDSINCD

SEQ ID NO: 4541 - protein, 328 aa, Brassica napus
MTLRSLILEMRSRSHRVVHDLASAADSTPPASSETNRWSDIPEELLREILIRVEAADGGNWPSRRSVVACAGVCRGWRLLMNETVGVPEISSKLTFPISLKQPGPRESLIQCFIKRNRATQSYHLYLGLTNSLTDEGKFLLAASKLKHTTCTDYIVSLRSDDMSRRSQAYVGKVRSNFLGTKFTVFDGNMLPSSTSTGPARLRKNRSYNPAKASAKVPLGSFPVSHITYELNVLGSRGPRKMQCVMDTIPTSAMEQPRGVSSSEPSEFPYLGGSRSTFSRSQSKPLRSSSGLSHLKETPLVLSNKTPRWHEQLRCWCLNFHGRVTVAS

SEQ ID NO: 4542 - protein, 280 aa, Petunia x hybrida
MGRAPCCEKMGLKKGPWTPEEDQILVSYIEKNGHGNWRALPKLAGLLRCGKSCRLRWTNYLRPDIKRGNFTREEEDTIIQLHEMLGNRWSAIAARLPGRTDNEIKNVWHTHLKKRLKNYQPPQNSKRHSKNNHDSKAPSTSKMLDNSESFSTIQENINEPMTGPNSPQRSSSESSTVTADSLAATDVTNDDQTFIKHEEMDSYENFPEIDESFWTEDLSMGDNLDLDMEVAGEKSQVQFPYSHDMKEQSVDMVGAKLEDDMDFWYNVFIKAEDLLDLPEF

SEQ ID NO: 4543 - protein, 420 aa, Lupinus polyphyllus
STYISSGPYSCYSSASNSYPFFPFLNPENASSSNNNNNHNLLHDPLVHVPYNLPSHHHIHNTPIIQETLTNLAVSDAATMPKQDPIMNGGGGGVHHHYGLSSLLTKKPAKKDRHSKIYTSQGLRDRRVRLSIEIARKFFDLQDMLGFDKASNTLEWLFNKSKRAIKDLARSKKSNGSEGDANSLSSSSDREECNEVVSGINNEQQGITIADHDSNGVKDMKKLKRAQKEPACVRAKMKESREKARARARERTSNKINNNNNNGRVVQVQDLKKKFIATTENNTHTLQQLRSPLQLEDCARSPNNKLLHPHFSSEVPRDDNFNVIEESIVIRRKLKPSMMSSSSHQHHHQNTMIPKEASFNNNNNNDYNSFTNLSPNWDNNGRSNFCTIASMNLSTGMQCFCFINMFFFETFHFDDYIKRL

SEQ ID NO: 4544 - protein, 227 aa, Glycine max
MTTMTGGDNRVKGSWSPQEDATLLKLVNEHGARNWSVISAGIPGRSGKSCRLRWCNQLSPEVQHRPFTPAEDKMIIKAHAIHGNKWATISRLLPGRTDNAIKNHWNSTLRRRRTAQSSSSSASPPAKRPSSLFDTLHPLKKQCIEKENEEESPVTTSLSLFPPGEKSEEEEEEEEKEEFANQKVSDQNYFMQMMQRLIAEEVRNYMETLRNCSLEPGLDLLSPTLPK

SEQ ID NO: 4545 - protein, 276 aa, Oryza sativa (indica cultivar-group)
MAAAQQTEEDMGPPWLRPLLSTSFFVACASHPELSKNECNLFCLGCTGDALCAYCLPAHRDHHVVQIRRSSYHNVIRVSEVGKLIDISHVQTYVINSAKIVFLNGRPQARPGKGVTNTCEICCRSLPDSFRFCSLGCKLATLHLDLCRPWHLSLEVSLANMTAQGGVQQANETFSMESLGGMRWDPSLTFAIRPKRGQDSGDGGSGSDYDSFSPKKARRAAAGYDQLGRFDRGMIRWSDDEGSKSNTAPITPTTPPISRCRPSRRKGIPHRAPFYG

SEQ ID NO: 4546 - protein, 191 aa, Oryza sativa
  misc_feature (147)..(147): Xaa can be any naturally occurring amino acid
MSTVSGTRRAPRRQSQDGPGDKVVVNLDAISSPVVGSRRAVPTSTGARASPIDVEALDDEVQTLSASQVPPPRRNRRTRRQPVAVVDLEVDASREGNKRQRVAPVIHCLSPERGEGSSLKTSNEPPKAKEPVFNCPVCWNKLGEPLXTICGHIFCTTCIKQAIQIQKKCPTCRKSLRANNFHRIYLPNSDS

SEQ ID NO: 4547 - protein, 376 aa, Triticum aestivum
MSSTSVPPPPVPLAPERRVPVVVPVVPHLAEGGGGGSGDDARGSGGMAGISPSILIIAVIVVVMLLASISIHYFIRSLCRRSSSSASGSSAPPLPLVAVRSSAVAPAAAAPVADQGKEAAAERERLIGRLPLFTLASSLAALPRSSRDCAVCQCVFCADDELRLLPACRHAFHSGCVDPWLRANPSCPLCRASIALPYPPLPELLRVELGSVSSRRSTSSSSSAAVAAAPPEGVRAYPLPNSNTNTEYLVEEDLQVVLKPPSAANPAPPPPPTARITGEPSQQLAAAAERALSSSVTPTASFRSVGRSSSRWSNRWSSRWSSGRWSSRYDAGSVTAAATAEWWWDMDGGVAPASRRAESEDGSAFYGFVRWLTGAY

SEQ ID NO: 4548 - protein, 224 aa, Brassica juncea
MARGKIQIKRIENQTNRQVTYSKRRNGLFKKAHELTVLCDARVSIIMFSSSNKLHEFISPNTTTKEIIDLYQTVSDVDVWSAHYERMQETKRKLLETNRNLRTQIKQRLGECLDELDTQELRSLEEEMENTFKLVRGRKFKSLGNQIETTKKKNKSQQDIQKNLIHELELRAEDPHYGLVDDGGDYDSVLGYQLRFQPNQHHHYPNHALHAASASDIITFHLLE

SEQ ID NO: 4549 - protein, 293 aa, Triticum aestivum
MGRPSSGGVGQPKLRKGLWSPEEDEKLYNHIIRHGVGCWSSVPRLAGLNRCGKSCRLRWINYLRPDLKRGCFSQQEEDHIIALHQILGNRWSQIASHLPGRTDNEIKNFWNSCIKKKLRRQGLDPAMHKPMANADTATAALPDAQEEDRKPLAAAADGSLAPKQPAVFDPFPVCADYGAGFADGLGTANAAALYGQFGCGKEGADDDAGFGAADYSCVLDVSENLGYGEGSSNSSNWNYGGEVGSVLDGEVPHWGKAEMEQQHTPLGHKLSLPCQEQSLLASFDFNLELEPYF

SEQ ID NO: 4550 - protein, 252 aa, Brassica juncea
MAYQTELGGESSSQRKAGRGKIEIKRIENTTNRQVTFCKRRNGLLKKAYELSVLCYAEVALIVFSSRGRLYEYSNNSVKGTIERYKKAISDNSNTGSVAEINAQYYQQESAKLRQQIISIQNSNRQLMGETIGSMSPKELRNLEGRLDRSVNRIRSKKNELLFAEIDYMQKREVDLHNDNQLLRAKIAENERNNPSMSLMPGGSNYEQIMPPPQTQPQPFDSRNYFQVAALQPNNHHYSSAGREDQTALQLV

SEQ ID NO: 4551 - protein, 187 aa, Medicago truncatula
MTRPFRFLGELNSSSSDSPESSTVVDSDFVVILAALLCALICVLGLVAVTRCGCLRRLRLSSTTNNTSPAAPPAAANKGVKKKVLRSLPKLTATEESAVKFSDCAICLSEFTAGDEIRVLPQCGHGFHVSCIDLWLRSHSSCPSCRQILVVSRCDKCGGIPPPATTTTAGSSSTAAPAPDCEGRLKG

SEQ ID NO: 4552 - protein, 316 aa, Ashbya gossypii ATCC 10895
MEQDNSVFPFADAPSIVQAHQKDVYIESILGTKLEDALKALKGQLFANRYYQEISIASKILYLGLTTLRERRTLGEEYVDLIYVSRNGMGLVKAWRRLLFVLSYAALPYGLSKLFKRLKRRYEDDTPNKNGILHYLAGLTFKDIMDNALSVHLLVFYLTGGFYQISKRIFGLRYAIGHDVTKEEKEFRKSSSRSYRILGGLVLLQLLAKVQPHVNTMLKMYLKSPTENATNKNGILTNGSPEATARHIELSNPEIFPFISEQSRKCILCLADMTDPSCLPCGHMFCWACVMQWCNERNECPLCRQHCTKQSILQLR

SEQ ID NO: 4553 - protein, 631 aa, Zea mays
  misc_feature (253)..(253): Xaa can be any naturally occurring amino acid
  misc_feature (276)..(276): Xaa can be any naturally occurring amino acid
  misc_feature (309)..(309): Xaa can be any naturally occurring amino acid
  misc_feature (318)..(318): Xaa can be any naturally occurring amino acid
  misc_feature (367)..(367): Xaa can be any naturally occurring amino acid
  misc_feature (397)..(397): Xaa can be any naturally occurring amino acid
  misc_feature (403)..(403): Xaa can be any naturally occurring amino acid
  misc_feature (430)..(430): Xaa can be any naturally occurring amino acid
  misc_feature (453)..(453): Xaa can be any naturally occurring amino acid
MTPLPMKEDVRAPPPLPSLIPESVLIQDVVAAAEPSVEYHCNSCSVDCSRKRYHCRTQADFDLCCDCYNEGKFDPGMAKTDFILMDSAGVSGASGTSWTDEETLLLLEGLEIFGGKWAEIAEHVATKTKAQCMLHFLQMQIEDRFHDGKDINQNIPVSTEQATTEKAIAETSEKMEVEDKVEGRGTADEKASEKTEGNCEETKTENASVVVNKDTQNSDGRDSGASPCTEEPKQSSDEQPVVKENSADVDTSXKNYQIVAIDIQKSAFEATGHSPXEYEGSFADAGNPVMALAAYLAGLVEDDNTTTFXRSSLKCLYXWSPALQLKLGFSVILEEYQIRRLTALVIEKLIQKIEENMTLFSEIEQVXLSNERVQREDQKEAPVGTKCNSCSSDGRIXPSRPNXRCSRKQVPNLGMANLHVRPPNAMPRPXPAKEIPDSGHPVIYTGTILLEAXTPKTQTCQLVVAFFRKYIGKLLYREDHLTSTTVLNIESVVVDEEKGSVVTANRPDSIARLKRAAATAVSAAAVKARFLGDQEEYQIRRLTALVIEKLFQKIEVKMSLFSEIEQVVFRTREYTEKTRKKLLKERNAIIAARMGALPSRPNQPGVAGNRLPPGYGNPPVRPPNAMPRPTS

SEQ ID NO: 4554 - protein, 294 aa, Zea mays
MKRPTSRGSSMVSGQATTDLQEDSCRSMEPHGVDGDATAAAERDDVDAGAYDEEEDEEEELAGSRGGLGEKKRRLAADQVRALERSFEVDNKLDPERKARIARDLSLHPRQVAVWFQNRRARWKTKQIERDFAALRVRHDALRVECDALRRDKDALAAEIKELRGMVEKQMEVKLESAAEELLPVATRSAAAAAVYNKDGSTDSDSSAVFNEEASPYPYSGAALDHQQQQETSHPLGFTGFTSFLTSSFPSVYHGDSHLDQEADGFFSAAAAGDGFFAEEQSAGIGSWYGGEGW

SEQ ID NO: 4555 - protein, 251 aa, Vitis vinifera
MGRSPCCEKAHTNKGAWTKEEDDRLIAYIRAHGEGCWRSLPKAAGLLRCGKSCRLRWINYLRPDLKRGNFTEEEDELIIKLHSLLGNKWSLIAGRLPGRTDNEIKNYWNTHIRRKLLNRGIDPSTHRPINEPSPDVTTISFAAAVKEEEKINISSTGGFGCKTEKNPVTEKCPDLNLELRISPPYQPQAETPLKTGGRSSSTTLCFACSLGIPNSEECSCSIGTSSGSSSSGYDFLGLTSGVLDYRGLEMK

SEQ ID NO: 4556 - protein, 607 aa, Oryza sativa (japonica cultivar-group)
MDSDAEMPMSSDEEMLDDEDYYDYSDDMGEDDDGSGGGGGGDSDGEEEEEGDEELVGGDYEGREAEGSDEVVSRREQRYIVLTEKDINERQEEDIGKVSAVLSIRREEACVLLHHYKWNISKLSDEWFADEEKVRDIVGLLLNGIDLPNSRKLTCGICFEGYSSDVMSSADCDHFYCHECWEGYISAAISDGPGCLSLRCPDPSCGAMVLQNMINKLAKDDDKVRYARFILRAYVEDSKKTKWCPAPDCTCAVEFVSDGNYDVSCNCKFSFCWNCTEEAHRPVNCETVSRWILKNSAESENMNWILANSKPCPKCKRPIEKNQGCMHMTCTPPCKFEFCWLCLGSWAEHGERTGGFYACNRYESAKKEGVYDETEARRERAKNSLERYMHYYERWASNQTSRQKAQADLQKAEKEQLAKLTDVFGIPETQLKFIIEAWSQIIECRRVLKWTYAYGYYLDDKVKSEFFEYLQGEAESGLERLHQCAEKDLQSFLTVRSDNTEPAPSIAEFGDFRVKLAGLTSVTRNYFENLVQALEAGLEDVHSTAQGTTSSNATNIPSKKAVTKGKTKKQLPRTSSDNSDEGWPCERCTFINPSSVDACSVCDKHRY

SEQ ID NO: 4557 - protein, 424 aa, Lupinus breweri var. bryoides
STYISSGPYSCYSSASNSYPFFPFLNPENASSSNNNNNHNLLHDPLVHVPYNLPTHHHIPNTPIIQETLTNLAVSDAATMPKQDPIMSGGGGGGVHHHYGLSSLLTKKPAKKDRHSKIYTSQGLRDRRVRLSIEIARKFFDLQDMLGFDKASNTLEWLFNKSKRAIKDLARSKKSNGSEGDANSLSSSSDREECNEVVSGINNEQQGITTADHDSNGVKDMKKLKRAQKEPDCVRAKMKESREKARARARERTSNKMCNNNNNNNNNNGRVVQVQDLKKKFIATTENNTHTLQQLRSPLQLEDCARSPNNKLLHPHFSSEVPRDDNFNVIEESIVIRRKLKPSMMSSSSHQHHHQNTMIPKEASFNNNNDYNSFTNLSPNWDNNGRSNFCTIASMNLSAGMQCFCFINMFFFETFHFDDDIKRL

SEQ ID NO: 4558 - protein, 368 aa, Triticum aestivum
  misc_feature (154)..(154): Xaa can be any naturally occurring amino acid
MEMKERQRWRPEEDAILRSYVRQYGPREWNLVAQRMNVPLDRDAKSCLERWKNYLRPGIKKGSLTDDEQRLVIRLQAKHGNKWKKIAAEVPGRTAKRLGKWWEVFKEKQQREIRDSRRPPPEPSPDERGRYEWLLENFAEKLVKERQQGGSGAXTPLHHHPPHGGFPCSRPWNAVPRRPTARPSLPAPPSPSRDARPRPPPSSRPRPARRGCRSSRRWRRTAPRSGFARPPPAPGMVPDAPQAALAELAECCRDLDQGHRAWAAHRKEASWRLKRVELQLESERACRRREAAEEFEAKMRALWEEQAAAVERLEAEYREKVAGLRRDAEIKEQKMAEQWAAKHARLTKFLEQVGSSCRRWPPGEMNGR

SEQ ID NO: 4559 - protein, 332 aa, Oryza sativa (japonica cultivar-group)
MQPPPMRERQRWRPEEDAILLAYVRQYGPREWSLVSQRMNRPLHRDAKSCLERWKNYLRPGIKKGSLTDDEQRLVIRLQAKHGNKWKKIAAEVPGRTAKRLGQVVGGVQGEAAAGGSRDRGSPANSGAAGRRPGRLRRRAIRLGPREFADKVVNDHQRRMMAAPILPPWMSSSPSSSSLPSVTLSLASAAVAPATAAPPPTWGGGGGGEGDGGRAEGVGGAQEGGGVEDEEGGDAAGDGEGVPAAGGDGGVRGEDEGAEGGAGSCGGAGGGGVPGEDGGLRRDAEAKEQKMAEQWAAKHARLAKFLDQVAACRRWPPVEINGGGGGGPGGGR

SEQ ID NO: 4560 - protein, 514 aa, Coccidioides immitis RS
MGVIRKKNAARGTDGGTKYHCDVCSVDVTNTVRISCAHSACHEYDLCVPCFAAGQHSKNHDPRTHPYSVIEQNSVPIYDPDWGADEELLLLEGAEIYGLGSWADIADHIGGYRTKEEVRDHYIQTYINSPNFPLPELADPRDKTLQEQIPKEEFQARKKRRIEERKEAAKTAPPATPKQKPTASVPACHEVQGYMPGRLEFETEFANDAEEAVQHMQFEPGNGLNANGELDAEMELKMTVKDIYNSRLTARTERKKILFEHNLLDYRKNTALDKKRTKEERDLLNKAKPFARMINHEDFEEFTKGLEYEHNLRIAIAQLQEWRTMGIGDLKSGEKYEQEKAQRAQRAVPQGAFDRFASARPKPQQPEGPSAAAQLTMPELPLRLQRKLAPVDPPPVLNDFDKAFASGNLNGTMTPQPAKSKFVVPPINGLAPWKLENDKAPDIHLLTKEEVELCNILHLQPKPYLVIKEHLLKEAMKQGGSLKKKDARNMCKIDVAKSSRIFDFMVHSGWISKA

SEQ ID NO: 4561 - protein, 420 aa, Lupinus lepidus var. utahensis
STYISSGPYSCYSSASNSYPFFPFLNPENASSSNNNNNHNLLHDPLVHVPYNLPSHHHIHNTPIIQETLTNLAVSDAVTMPKQDPIMNGGGGGVHHHYGLSSLLTKKPAKKDRHSKIYTSQGLRDRRVRLSIEIARKFFDLQDMLGFDKASNTLEWLFNKSKRAIKDLARSKKSNGSEGDANSLSSSSDREECNEVVSGINNEQQGITIADHDSNGVKDMKKLKRAQKEPDCVRAKMKESREKARARARERTSNKMCNNNNNNGRVVQVQDLKKKFIATTENNTHTLQQLRSPLQLEDCARSPNNKLIHPHFSSEVPRDDNFNVIEESIVIRRKLKPSMMSSSSHQHHHQNTMIPKEASFNNNNNNNNDYNSFTNLSPNWDNNGRSNFCTIASMNLSTGMQCFCFINMFFFETFHFDDYI

SEQ ID NO: 4562 - protein, 217 aa, Arabidopsis thaliana
MNYTVDDQNMAFISQLYPDVYTQIVQPVGEVKQPKRRRKKTKGSVASADGGNGLFRKRKLTDEQVNMLEMSFGDEHKLESERKDRLAAELGLDPRQVAVWFQNRRARWKNKRLEEEYNKLKNSHDNVVVDKCRLESEVIQLKEQLYDAEREIQRLAERVEGGSSNSPISSSVSVEANETPFFGDYKVGDDGDDYDHLFYPVPENSYIDEAEWMSLYI

SEQ ID NO: 4563 - protein, 419 aa, Lupinus andersonii
YTSSGPYSCYSSASNSYPFFPFLNPENASSSNNNNNHNLLHDPLVHVPYNLPSHHHIHNTPIIQETLTNLAVSDAATMPKQDPIMSGGGGGGVHHHYGLSSLLTKKPAKKDRHSKIYTSQGLRDRRVRLSIEIARKFFDLQDMLGFDKASNTLEWLFNKSKRAIKDLARSKKSNGSEGDANSLSSSSDREECNEVVSGINNEQQGITIADHDSNGVKDMKKLKRAQKEPACVRAKMKESREKARARARERTSNKINNNNNNGRVVQVQDLKKKFIATTENNTHTLQQLRSPLQLEDCARSPNNKLLHPHFSSEVPRDDNFNVIEESIVIRRKLKPSMMSSSSHQHHHQNTMIPKEASFNNNNNNDYNSFTNLSPNWDNNGRSNFCTIASMNLSTGMQCFCFITMFFFETFHFDDYIKRL

SEQ ID NO: 4564 - protein, 253 aa, Zea mays
MDASLAGVVLRRGHMISIGHRKIRSIHYLHRPHPPVRGYSSHHYKERIVTHREFVMDQDDYLSLCLAAALVAASQQAAGDAPPLRARAAASELRPLHFRCPICGKAFASYQALGGHKASHRKPAAAAAAYDGKAPSSPSSSGQHQKGAVAAGIGGASAGGRHVCTVCHRYFATGQALGGHKRFHYLHGPSVPASSLPPSTAGAAAGVGWLDLNLTPLAPDVSFAGVRRRRGEDDEVQSPLPLPAKKHRASTSA

SEQ ID NO: 4565 - protein, 417 aa, Lupinus sericeus
STYTSSGPYSCYSSASNSYPFFPFLNPENASSSNNNNNHNLLHDPLVHVPYNLPTHHHIHNTPIIQETLTNLAVSDAATMPKQDPIMNGGGGVHHHYGLSSLLTKKPAKKDRHSKIYTSQGLRDRRVRLSIEIARKFFDLQDMLGFDKASNTLEWLFNKSKRAIKDLARSKKSNGSEGDANSLSSSSDREECNEVVSGINNEQQGITIADHDSNGVKDMKKLKRAQKEPACVRAKMKESREKARARARERTSNKINNNNNNGRVVQVQDLKKKFIATTENNTHTLQQLRSPLQLEDCARSPNNKLLHPHFSSEVPRDDNFNVIEESIVIRRKLKPSMMSSSSHQHHHQNTMIPKEASFNNNNNNNDYNSFTNLSPNWDNNGRSNFCTIASMNLSTGMQCFCFINMFFFETFHLDDYI

SEQ ID NO: 4566 - protein, 957 aa, Chlamydomonas reinhardtii
MATIQLTDQQRKVLHEVACTTAAPVLDTASKDKIKQLLDDYDMRKAAMGSKPGANMVLPGQVLGEAGPFLDYGHPPGVALGDKFKDRGQVMVAGVHGTTVRGIHAPNAGSEHFVRGAYSVLMSGVYVDDEDMGEAFWYTGEGGMDGKKQVKDQQMASGSNAALKNNCDTRTPVRVVRGFVQEAGGGEGGGGGEGGGGAKKGKGGKGGGKKEKGLVYEGLYLVLECKMEPSKDGPQVCKFLMHGLPGHSTVSAKVEYNIFGNAGSAYSLHARRLAGAGAPAGGKRARKAAQDEKARELARQWMLSEIRRQYPGPELQLEDVSGGQEAVPIPVINQVNSERLPTDFAYTREYAWAPGVYQLVAPALRLADEEMLQFSREGDRGGVCGIAFNRHIAALDRRLEQEGRLPQGYEAHLEEQYNAAGCLMVTDPCGVHECGDGCSAKACRRNMQLSAGVQLPLEVFMTESKGWGVRCREEVPAGAFVCCYVGQLITDAMAEVRKGVDHYLFDLDFFAHIYAEIAEKGMQAVAEEIPLHKIPPVLSVGMIRQAQINAADAARRLPEQQPQQQQPQQQQQQPAAGGAAPGGAAAGEQAAGGAEGGGAYGGGGAAAAATAAGTAPGAGDNMDGVEGPAAQRSGGEEAAAGPGSSGAAGGCGYRLDGMVTREGLAQAAHALAEACDALARSVADGASTNLGGENILAAIEAAKARAAAAATTSGGAAAADQHQLEQLDRAAALAAASKAAADAVKAGDPGAFYLQPIISRDEEKAAERAAAAAAAAAAAAGVPPALPSTSDVGNGGTTGSGGGGGAFSNRGPAGCAVGSPRALAARSGMEAAAQAAGGAASGPVAGPGAVEDHGEEYAPMLVIDARTTGNVGRFINHSCDGNLTIQAVFAGVYRSTLLYHVGLYACRNIPQLEELSYNYGYHKQQQQQQQAQRGGAAEKQFVMQCNCGAVGCIGNLM

SEQ ID NO: 4567 - protein, 113 aa, Pelargonium x hortorum
WRKYGQKMAKGNPCPRAYYRCTMAVGCPVRKQVQRCADDRSILITTYEGNHNHPLPPAAMAMASTTTAAASMLLSGSMPSADGIMNPNLLARAMLPCSSSMATISASAPFPTV

SEQ ID NO: 4568 - protein, 210 aa, Alpinia hainanensis
EKIENPTNRQVTYSKRRSGIMKKARELTVLCDAEVSIIMFSSTGKFSDYCSPFTNTKSIFDRYQQVSGINLWSAQYERMQNNLNRLKEINRKLRREIRQRMGEDLDGMDIKELRGLEQNLDEALKVVRNRKYHVISTQTETYKKKVKSSQEAHRNLLHQLEMKDEHGGVYMYVDDDGVPAHPMYSYKVQPNQPNLQAIRSYASHHDLRLA

SEQ ID NO: 4569 - protein, 267 aa, Alpinia hainanensis
MEHKADQDRLLGFKGGKLEPPVAAVGRMGRGKIEIKRIENTTSRQVTFCKRRNGLLKKAYELSLLCDAEVALVVFSCRGRLYEYASSSVKSTIEKYKKACKDTTNDGFVSEANAQYYQQEASKLRQQINSIQISNRNLMGESLHSMNLRDLKQLESRLEKGIGKIRNKKNELLFAEIEYMQRREMELQSDNIFLRNKIAETDRVHQQMSMLPSTGATVAYEAMPTYYSGNFMQCKNRSQTNIYPQQRQRTFTSTPMRSKHGAWVLRG

SEQ ID NO: 4570 - protein, 248 aa, Cleome spinosa
MGRGRVELKRIENKINRQVTFAKRRNGLLKKAYELSVLCDAEVALIIFSNRGKLYEFCSSPNMLKTLERYQKCSYGSIEVNNKPAKELENSYREYLKLKSRFEGLQRQQRNLLGEDLGPLNSKELEQIERQLDGSLKQVRSIKTQYMIDQLSELQSREQMLLEANRALSMKLDEMVGARTHHIGGGWEGSEQNVTYGHQPQPQGLFQPLECNPTLQIGYNNPECPEQMTATTQAPAQAGNGYIPGWML

SEQ ID NO: 4571 - protein, 239 aa, Oryza sativa (japonica cultivar-group)
MAEHFSHAGMYIGYTADAAASSSSSSSSSSSSSSEMLRFDTGWPDETPAPSSVAGRRRSAGGDHRQGRGQTEAAAAFIGVRRRPWGRFAAEIRDSTRNGARVWIGTFDSAEAAAMAYDQAALSARGAAAALNFPVERVRESLHALSLGAAGGSPVLALKRRHSKRKRRKKAELLAAAAATAATANATPQTRRISKSTELTTATTDEQKRFVVELEDLGAEYLEELLWLSEINGGSDPAD

SEQ ID NO: 4572 - protein, 232 aa, Glycine max
MVMEESNPLDNEVQPTTSSSSFTITTPSTSSSSSIEEATNTTTKEKKKKRAISNIEGKHPTYRGVRMRQWGKWVSEIREPRKKSRIWLGTFPTPDMAARAHDVAALTIKGSSAYLNFPELAAKLPRPASTSPKDIQAAAAKASALDFGHQSHEAESELSQAVSSSIQTQSSSSSSNSSLKGVDDTFLDLPDLSLDLSHGADEFHYSSAWLVAGAEHIELGFRLEEPFLWESY

SEQ ID NO: 4573 - protein, 194 aa, Glycine max
MEQELQRNSVHDDEAATTTSSGDKPAIPRGGGTRHPLFRGVRKRRWGKWVSEIREPRKKSRIWLGSFPAPEMAAKAYDVAAYCLKGRKAQLNFPDEVHRLPLLPSACTARDIQAAAAKAAHMMIVQAASATADSPEKSSSITSDCGGGGGGDDFWGEIELPELLNAKWWASDHDVTPWPESELPPQQPFTTACL

SEQ ID NO: 4574 - protein, 160 aa, Phillyrea latifolia
RGRGMGDDGYRWRFYGQKVVKGNPPPGGYYKCTYPACPVRGHVAHDLTPGVITPYEGPHNHDVPGAARGSGSHSINTPMPSKNNGNGGAGGTAIRPGAMTHHNNNNAMNKKGIHNLRLPSSEGQAFFTGEMLQPRGGSGPGYSGPGNAMLYMSLCQNALS

SEQ ID NO: 4575 - protein, 378 aa, Oryza sativa (indica cultivar-group)
MDFSCFNPQPAISHGIPFDSFLLQDELHHHADLDHPFEAEGITVHGSELEGGSVLPFATLHDLDHEFFRRGSRKDFIDNASSIFLLNPKTEVSHLVRDVQVGAFGAYEMNGRLISRNKTSRKGIKKADAVKGHWTVEEDRKLVKLVEQFGLKKWSLIGGMLPGRVGKQCRERWFNHLRPNIKKDTWSEEEDMVLIQIHKEVGNRWAEIAKRLPGRTENSIKNHWNATKRRQFARRRNRSTSKSGSTVLQNYIKSLAISPQESQMNNERSESNPSDMMITQGTPCCFDGNNCSQSHTSEENIVPSCGDFAAEMWSGLFDTKEDEEDEAQYLLYDMDTHVDMNCIFSNMDYGSNIEPGLASVVKAECSAESWAVNLKETD

SEQ ID NO: 4576 - protein, 251 aa, Glycine max
MGRGRVQLKRIENKINRQVTFSKRRSGLLKKAHEISVHCDAEVALIVFSTKGKLFEYSSDPCMEKILERYERYSYAERQLVASDQPLTENWTLEHAKLKARLEVLQKNQRVCLLFCRNFMGQDLEGLSIKELQNLEHQLESALKHIRSRKNQLMYESISELHKKDKALQEQNNTLAKKIKEKEKALAQQAQLERLGDEVDLTSSALVPQPLVTSNIRTSSQIRGEGDNEGTPTPTQANAILPPWMLRPTNE

SEQ ID NO: 4577 - protein, 196 aa, Brassica napus
TPVNTCKRKDSDDVWYKEIETCVTPFPKVSNEEEVAGGKLKKFPERLFAVPPSVSKGLVSGVDAETYQEDVKLWKKRVGRYRRINSLIGSTRYRNVMDMNAGLGGFAAALESPKSWVMNVVPTITKKTLSVVYERGLIGIYHDWCEGFSTYPRTYDFIHANGVFSMYQHSCKIEDILLEMHRILRPEGIVIIRDEV

SEQ ID NO: 4578 - protein, 253 aa, Zea mays
  misc_feature (179)..(179): Xaa can be any naturally occurring amino acid
MGRGKVQLKRIENKINRQVTFSKRRSGLLKKAHEISVLCDAEVALIIFSTKGKLYEYSTDSCMDKILERYERYSYAEKVLISAEYETQGNWCHEYRKLKAKVETIQKCQKHLMGEDLETLNLKELQQLEQQLESSLKHIRTRKSQLMVESISALQRKEKSLQEENKVLQKEKALLLHAXLAEKQKDQRQQVQRDQTQQQTSSSSTSFMLREAAPTTNVSIFPVAAGGRVVEGAAAQPQARVGLPPWMLSHLSC

SEQ ID NO: 4579 - protein, 245 aa, Oryza sativa
MSCGGAGQSGWLLEYGLVEEEIQGSDFIYMVDDPAAVSSVLLGFDVPRKEDGSGGQDNSASKKRSRPESSAPPGTKACREKLRRDRLNERFNELSAILEPGKPPRADKVSILSDAARLLSQLRAEAQKLKSSNESLQDSIKSLKAEKSELRDEKTRLKAERERLEQMIKGVGAATPAAPAPFVPHHAAAVACAPAYHPAAFAQAGGQYVREATTRRGRFWHGNGEVSKVQDREWRRGVLVVDTGN

SEQ ID NO: 4580 - protein, 328 aa, Oryza sativa (japonica cultivar-group)
MDFHHGDADDFALEFIREHLLGVDGATATATEPADLEVVEPAAAYPPMSWQEQRQQEQHGCHVELTDEHLESAPAAEAAAAFRTAPAQPAAEVMIKFGGEPSPVRPSSSLTISLPPSSFGSWASAAAPAAAAVEDFRKYRGVRQRPWGKFAAEIRDPKRRGSRVWLGTYDTPVEAARAYDRAAFRMRGAKAILNFPNEVGTRGAELWAPPPPPPAHSAAASTTNKRKRQPSEDPDDGVEVIGVVSKAVKTEAPTSNSSSLSSSLTSRDTTPATSSAGAEHAGAAAESSPATPSSWSWEQYWEALLGGLPPLSPLSPHPALGFPQLTVN

SEQ ID NO: 4581 - protein, 416 aa, Lupinus rivularis
TSSGPYSCYSSASNSYPFFPFLNPENASSSNNNNHNLLHDPLVHVPYNLPTHHHIHNTPIIQETLTNLAVSDAATMPKQDPIMSGGGGGGVHHHYGLSSLLTKKPAKKDRHSKIYTSQGLRDRRVRLSIEIARKFFDLQDMLGFDKASNTLEWLFNKSKRAIKDLARSKKSNGSEGDANSLSSSSDREECNEVVSGINNEQQGITIADHDSNGVKDMKKLKRAQKEPACVRAKMKESREKARARARERTSNKINNNNNNGRVIQVQDLKKKFIATTENNTHTLQQLRSPLQLEDCARSPNNKLLHPHFSSEVPRDDNFNVIEESIVIRRKLKPSMMSSSSHQHHHQNTMIPKEASFNNNNNDYNSFTNLSPNWDNNGRSNFCTIASMNLSTGMQCFCFINMFFFETFHFDDYIKRL

SEQ ID NO: 4582 - protein, 390 aa, Oryza sativa (indica cultivar-group)
MSSFAHHHHGSLVEKDGRMSALRSSLRPYEAAEEMAAAAAAGGPAAAWGAVERGAGMMGDGFSVEDLLDLEELCEVDRDGGEQGEAAAAAAAAAAVEKERSSDSHGSSVVSYEPMPLLPPVMDLPAHDVEELEWVSRIMDDSLAELPLPQLPAAAAALAACGKPQHRRPHEGAASALLDPMRTPTICALSTEALVPVKSRRSKRSRASVWSLSGAPLSDSTSSSSTATTSSCSSSASFSPFLQYVDFPALVASDLLDEQPRSKKSKHGKNGKQKPKKRGRKPKHQQPPHLAAAAAAGGGALPATGDRRCSHCGVQKTPQWRAGPEGAKTLCNACGVRYKSGRLLPEYRPACSPTFVSSLHSNSHRKVLEMRRKKETPVIVAAAAPAVASF

SEQ ID NO: 4583 - protein, 426 aa, Lupinus breweri var. breweri
STYISSGPYSCYSSASNSYPFFPFLNPENASSSNNNNNHNLLHDPLVHVPYNLPSHHHIHNTPIIQETLTNLAVSDVATMPKQDPIMSGGGGGGVQHHYGLSSLLTKKPAKKDRHSKIYTSQGLRDRRVRLSIEIARKFFDLQDMLGFDKASNTLEWLFNKSKRAIKDLARSKKSNGSDGDANSLSSSSDREECNEVVSGINNEQQGITIADHDSNGVKDMKKLKRAQKEPDCVRAKMKESREKARARARERTSNKMCNNNNNNNNGRVVQVQDLKKKFIATTENNTHTLQQLRSPLQLEDCARSPNNKLLHPHFSSEVPRDDNFNVIEESIVIRRKLKPSMMSSSSHQHHHQNTMIPKEASFNNNNNNNNDYNSFTNLSPNWDNNGRSNFCTIASMNLSTGMQCFCFINMFFFETFHFDDYIKSL

SEQ ID NO: 4584 - protein, 1226 aa, Oryza sativa (japonica cultivar-group)
MAGNEWINGYLEAILDSGGAAGGGGGGGGGGGGGGGGGGGGGGGGVDPRSPAAGAASPRGPHMNFNPTHYFVEEVVKGVDESDLHRTWIKLELEGILRISARRKEQEQVRRETSEDLAEDLFEGEKADTVGELAQQDTPMKKKFQRNFSELTVSWSDENKEKKLYIVLIRSYTAYFTHWCHSVYATKLQNFTEFLYSLFYFSLHGLVRGDNMELGRDSDTGGQVKYVVELARALAMMPGVYRVDLFTRQVSSPEVDWSYGEPTEMLTSGSTDGEGSGESAGAYIVRIPCGPRDKYLRKEALWPYLQEFVDGALAHILNMSKALGEQVSNGKLVLPYVIHGHYADAGDVAALLSGALNVPMVLTGHSLGRNKLEQIMKQGRMSKEEIDSTYKIMRRIEGEELALDAAELVITSTRQEIDEQWGLYDGFDVKLEKVLRARARRGVSCHGRFMPRMVVIPPGMDFSSVVVPEDTSDGDDGKDFEIASPRSLPPIWAEVMRFLTNPHKPMILALSRPDPKKNITTLVKAFGECRPLRELANLILIMGNRDDIDEMSAGNASVLTTVLKLIDKYDLYGSVAFPKHHKQSDVPEIYRLTGKMKGVFINPALVEPFGLTLIEAAAHGLPIVATKNGGPVDIKNALNNGLLVDPHDQHAIADALLKLVADKNLWQECRKNGLRNIQLYSWPEHCRTYLTRIAGCRIRNPRWLMDTPADAAAEEEEALEDSLMDVQDLSLRLSIDGERGSSMNDAPSSDPQDSVQRIMNKIKRSSPADTDGAKIPAEAAATATSGAMNKYPLLRRRRRLFVIAVDCYGDDGSASKRMLQVIQEVFRAVRSDSQMSRISGFALSTAMPLPETLKLLQLGKIPPTDFDALICGSGSEVYYPSTAQCLDAGGRLRPDQDYLLHINHRWSHDGAKQTIAKLAHDGSGTNVEPDVESCNPHCVSFFIKDPNKVRTIDEMRERVRMRGLRCHLMYCRNATRLQVVPLLASRSQALRYLFVRWGLSVGNMYLIVGEHGDTDHEEMLSGLHKTVIIRGVTEKGSEQLVRSSGSYQREDVVPSESPLIAFTKGDLKADEIMRALKEVTKAASGMDWQRPLCKTAYWFQSRVYTNMEEKEEMTMLSLGVGAASKHSISNRKFRLKEVTDHKFNLGDQDHNSGHVRKKLRLSEEQLTVLENMYEAGSNLDQALKQGLAEKLNIKPRQVEVWFQNRRARTKHKQIEEECKNRGGWRA

SEQ ID NO: 4585 - protein, 280 aa, Oryza sativa (japonica cultivar-group)
MKVSHQVSGEWKVPAPIAQAIRLHRNSMSSHDFARRVPKRRRTNKLLSQLLPDLNSLPAEGADDGGSPSSSVLVSHAQTSAVAVAGTSQYLVPAVVAGPHIGMSSCPIIVDDINDDVVIYSASSFPQVRQQAPRTEPVVTIEDDSETTPGQAGDAVDEHVDILLSLTLGRYPRHGHQRSSNISTSPVIHIIDTPSNVLKLEFLQYTYQALPEPEKAVPKEPTFNCPVCMNELVEPSSTICGHIFCKQCIKASIQAQKKCPTCRRKLTMNNFHRVYLPSAE

SEQ ID NO: 4586 - protein, 413 aa, Lupinus grayi
  misc_feature (232)..(232): Xaa can be any naturally occurring amino acid
TSSGPYSCYSSASNSYPFFPFLNPENASSSNNNNNHNLLHDPLVHVPYNLPSHHHIHNTPIIQETLTNLAVSDAATMPKQDPIMSGGGVHHHYGLSSLLTKKPAKKDRHSKIYTSQGLRDRRVRLSIEIARKFFDLQDMLGFDKASNTLEWLFNKSKRAIKDLARSKKSNGSEGDANSLSSSSDREECNEVVSGINNEQQGITIADHDSNGVKDMKKMKRAQKEPDCVRAKXKESREKARARARERTSNKINNNNNNGRVVQVQDLKKKFIATTENNTHTLQQLRSPLQLEDCARSPNNKLLHPHFSSEVPRDDNFNVIEESIVIRRKLKPSMMSSSSHQHHHQNTMIPKEASFNNNNNNNDYNSFTNLSPNWDNNGRSNFCTIASMNLSTGMQCFCFINMFFFETFHFDDYI

SEQ ID NO: 4587 - protein, 136 aa, Glycine max
TRPICIGLEEHSPRNSQHMYGREFQSMLDGLDEEGCVEEPGYQSEKKRRLSVDQVKALEKNFEVENKLEPERKVKLAQELGLQPRQVAVWFQNRRARWKTKQLERDYGVLKANYDALKLNFDTLDQDNEALRKQVE

SEQ ID NO: 4588 - protein, 192 aa, Oryza sativa (japonica cultivar-group)
MAARKLLEQPGTAAPPVLGGSIADDRDIVIILASLLCALICVLGIGLVARCACSRRGGGGPDAAAANKGVKKSVLRAIPTVEYVSPGGGGKGKEEEEAAAEEGEQSECAICLSDFEHGDAMRVLPQCGHAFHAACIDKWLRGHSSCPSCRRILVLQLPQGERCQRCGARPEPAAASAVWKPTHYSEVPPFLP

SEQ ID NO: 4589 - protein, 317 aa, Oryza sativa (indica cultivar-group)
MVFDHGARVYVDPDAEVVALSPRTLLESDRYVCEICGQGFQREQNLQMHRRRHKVPWRLFKRPASATASEIGGAAGGAGGAAAGAGAGGARKRVFLCPEPICLHHDPAHALGDLVGIKKHFRRKHGGRRQWVCARCAKGYAVQSDYKAHLKTCGTRGHSCDCGRVFSRVESFIEHQDACNSGRVRGEVVPVATTLPSGGGGACAAAAGGEEEQQREEVRRALEEKTAADSARERAREEAAAAERALEDARRARHRARGELEKALALRDHAARLIAQVTCHACRQRSLAVMSMAAIDGHGASAVAREHLRGGGVGAGI

SEQ ID NO: 4590 - protein, 300 aa, Arabidopsis thaliana
MGAPKQKWTQEEESALKSGVIKHGPGKWRTILKDPEFSGVLYLRSNVDLKDKWRNMSVMANGWGSREKSRLAVKRTFSLPKQEENSLALTNSLQSDEENVDATSGLQVSSNPPPRRPNVRLDSLIMEAIATLKEPGGCNKTTIGAYIEDQYHAPPDFKRLLSTKLKYLTSCGKLVKVKRKYRIPNSTPLSSHRRKGLGVFGGKQRTSSLPSPKTDIDEVNFQTRSQIDTEIARMKSMNVHEAAAVAAQAVAEAEAAMAEAEEAAKEAEAAEAEAEAAQAFAEEASKTLKGRNICKMMIRA

SEQ ID NO: 4591 - protein, 352 aa, Gossypium hirsutum
MGHHSCCNKQKVKRGLWSPEEDEKLINYITTYGHGCWSSVPKLAGLQRCGKSCRLRWINYLRPDLKRGSFSPQEAALIIELHSILGNRWAQIAKHLPGRTDNEVKNFWNSSIKKKLISHDHVPALASFADVHSSNHTEEAGFISLNANPNLILAAQQDQLYLSPTAPVLQSFGHHADLVHHHFPLTPMLPPPPPPSNTASFDPAWTLPFGPQHDQDDDQHHQVQVFNNEAAQNFVSDKLMNPPFDNPLMGPPTVPKLCEILEGNMVCNIPQTPSVSLENNIDPLVSRLSSCFPPIPAGSNYAHDMQVGASQMEYIDTIITSIPSSSSSSSLSALSSGQYLTNPNLPSSSWDP

SEQ ID NO: 4592 - protein, 352 aa, Gossypium hirsutum
MGHHSCCNKQKVKRGLWSPEEDEKLINYITTYGHGCWSSVPKLAGLQRCGKSCRLRWINYLRPDLKRGSFSPQEAALIIELHSILGNRWAQIAKHLPGRTDNEVKNFWNSSIKKKLISHDHVPALASFADVHSSNHTEEAGFISLNANPNLILTAQQDQLYLSPTAPVLQSFGHHADLVHHHFPLTPMLPPPPPPSNTASFDPAWTLPFGPQHDQDDDQHHQVQVFNNEAAQNFVSDKLMNPPFDNPLMGPPTVPKLCEILEGNMVCNIPQTSSVSLETNIDPLVSRLSSCFPPIPAGSNYAHDMQVGASQMEYIDNIITSIPSSSSSSSLSALSSGQYLTNPNLPSSSWDP

SEQ ID NO: 4593 - protein, 530 aa, Populus tremula x Populus tremuloides
MDELKIEERCLENKQLTPASSSSQSEEGSGSAILKSPGVYSPATVSPTNRRTTGPIRRAKGGWTPEEDETLRTAVATYRGKSWKKIAEFFPDRSEVQCLHRWQKVLDPELVKGPWTQEEDDKIVELVAKYGPTKWSVIAKALPGRIGKQCRERWHNHLNPDIKKDAWTLEEELALMNAHRIYGNKWAEIAKVLPGRTDNSIKNHWNSSLKKKLDFYLSTGKLPPISKNGFQNGTKDTNKSAVMKTMKESDSAAQTSSGTTDICKLDEDGKDQLESTLVLDVAASSSALPNEYADSVDLRCCDSELQQKFEDHQDKGIGSGLQFDRSTYGSLYYEPPLVEQLDSYPSNTGSVQHENNSCPVSSPIIFFTPPCVKSRDLSAQSPESILRIAAMSFPNTPSIFRKRKTAQVDLLPSKIGKAGEETVKDRLDMSVEHEKIENTLEKTAAQDGSLCESPASLGNGTIRPNDKPFNASPPYRLRSKRTAVFKSVERQLEFTFEKGRSDGTKPTRLSVKGGSPVTEDCSRATKMGVT

SEQ ID NO: 4594 - protein, 228 aa, Lilium regale
MGRGKIEIKKIENSTNRQVTYSKRRTGIIKKATELTVLCDAEVSLLMFSSTGKLSEFCSPSTDTKKIFDRYQQLSGINLWSAQYEKMQNTLNHLSEINRNLRKEISQRMGEELDGLDIKDLRGLEQNLDEALKLVRHRKYHVINTQTETYKKKVKNSEEAHKNLLRDLVNREMKDENPVYGYVDEDPSNYDGGLALANGASHLYEFRVQPSQPNLHGMGYGSHDLRLA

SEQ ID NO: 4595 - protein, 182 aa, Populus tremula x Populus tremuloides
MCTRGHWRPAEDEKLKELVEKYGPHNWNAIAEKLHGRSGKSCRLRWFNQLDPRINRSPFTEEEEERLLASHRIHGNRWAVIARLFPGRTDNAVKNHWHVIMARRYRERSRLHAKRTAQALVNEQNFSSKQDMQINCETRSFSSFVKKYCEKFGQYPLITHSYLPAFWKEFYNGDDPSNCEGN

SEQ ID NO: 4596 - protein, 447 aa, Debaryomyces hansenii CBS767
METKTRLYHCDVCSSDCTNRIRIQCAICADYDLCVPCFASGSATGDHKPWHDYQVIEQNTYPIFDKDWGADEELLLVQGCETFGLGNWQDIADHIGNRSKDEVKNHYFDIYLNSKEYPLPEMDKDFSDITPSKFLEQRKERLQFRKNMPLPPPKSKSVASVPLCHEIQGFMPGRLEFDVEAENDAEVPVKDMVFDPEDSLGDIEVKLTILDIYNSRLTTRAERKRVLLLNNLLEYRKNISIDKRKSKEEKDLLKKINALIRILTPEDFNDFSRDILTELKCRIRILQLQHWRRNGITTIEDGGKFEKDKLIRMAHYQRMGNGAGLNGRNSGAMGGHTPIPANGRKSHSLANSPQPEFKPKIGNTRAPLDISHAADFELLSNEEKQLCATLRILPKPYLAIKNQLMKEAVKNNGILKKKDARQSLKIDVNKASKIYEFFVQMGWCTQG

SEQ ID NO: 4597 - protein, 416 aa, Lupinus arboreus
TSSGPYSCYSSASNSYPFFPFLNPENASSSNNNNHNLLHDPLVHVPYNLPTHHHIHNTPIIQETLTNLAVSDAATMPKQDPIMSGGGGGFHHHYGLSSLLTKKPAKKDRHSKIYTSQGLRDRRVRLSIEIARKFFDLQDMLGFDKASNTLEWLFNKSKRAIKDLARSKKSNGSEGDANSLSSSSDREECNEVVSGINNEQQGITIADHDSNAVKDMKKLKRAQKEPACVRAKMKESREKARARARERTSNKINNNNNNGRVVQVQDLKKKFIATTENNTNTLQQLRSPLQLEDCARSPNNKLLHPHFSNEVPRDDNFNVIEESIVIRRKLKPSMMSSSSHQHHHQNTMIPKEASFNNNNNNNDYNSFTNLSPNWDNNGRSNFCTIASMNLSTGMQCFCFINMFFFETFHFDDYIKR

SEQ ID NO: 4598 - protein, 231 aa, Triticum aestivum
MDLQQVMEHQLFDDGAVPSCMISPLEADNGFTDELPSLQLPDVDLDFDIHEFSAPATAPAKAASSGGSGLVGSGSGSHKKLNHNAYERDRRTQLNQLYSTLRSLIPNADHTKKLSIPTTVCQVLDYIPKLQKQVEDLKKKKQELSTAKCRERLQRVKDNTCRIVSATPLDGNEIMVQVSLLSNMAASLPLSKCINVFENKGLHLISSSTFSTEVNRTFYSFHFEVRFYMRP

SEQ ID NO: 4599 - protein, 270 aa, Populus tremula x Populus tremuloides
MGRSPCCEKAHTNKGAWTKEEDDRLVAYIRAHGEGCWRSLPKAAGLLRCGKSCRLRWINYLRPDLKRGNFTEAEDELIIKLHSLLGNSRWSLIAGRLPGRTDNEIKNYWNTHIRRKLLNRGIDPATHRPLNEPVQEATTTISFTTTTTSVEEESRGSIIKEEIKEKLISATAFVCTEAKTQVQERCPDLNLELGISLPSQNQPDHHQPFKTGGSRSLCFACSLGLQNSKDCSCNVIVSTVGSSGSTSTKNGYDFLGMKSGVLDYRSLEMK

SEQ ID NO: 4600 - protein, 421 aa, Lupinus polyphyllus
  misc_feature (86)..(86): Xaa can be any naturally occurring amino acid
  misc_feature (263)..(263): Xaa can be any naturally occurring amino acid
  misc_feature (421)..(421): Xaa can be any naturally occurring amino acid
SSGPYSCYSSASNSYPFFPFLNPENASSSNNNNNHNLLHDPLVHVPYNLPSHHHIHNTPIIQETLTNLAVSDAATMPKQDPIMSGXGGGGGVHHHYGLSSLLTKKPAKKDRHSKIYTSQGLRDRRVRLSIEIARKFFDLQDMLGFDKASNTLEWLFNKSKRAIKDLARSKKSNGSEGDANSLSSSSDREECNEVVSGINNEQQGITIADHDSNGVKDMKKLKRAQKEPACVRAKMKESREKARARARERTSNKINNNNNNGRXVQVQDLKKKFIATTENNTHTLQQLRSPLQLEDCARSPNNKLLHPHFSSEVPRDDNFNVIEESIVIRRKLKPSMMSSSSHQHHHQNTMIPKEASFNNNNNNNDYNSFTNLSPNWDNNGRSNFCTIASMNLSTGMQCFCFINMFFFETFHFDDYIKRWKX

SEQ ID NO: 4601 - protein, 201 aa, Oryza sativa
MGRGRIEIKRIENTTSRQVTFCKRRNGLLKKAYELSVLCDAEVALIVFSSRGRLYEYSNNSSVKATIDRYKKAHACGSTSGAPLIEVNAQQYYQQESAKLRHQIQMLQNTNKHLVGDNVSNLSLKELKQLESRLEKGISKIRARKLDMKCFFPLNLFEAAAQVQAVAAQRQQIIPTELNLGYHHHLAIPGAAAADAPPPHF

SEQ ID NO: 4602 - protein, 173 aa, Aspergillus nidulans FGSC A4
MPPQNTPASDSDAPPGAVNISSLSTPQLRALQTRLSTELEHLTSSHAKLRAAQSRFRDCVRSINEGVIGSAKKGTEGKDEILVPLTSSLYVKGRLTDREKVLVDVGTGYYVEKTAAKAIEFYEQKVKELETNLTELEKLVQTKSSQQRLFEDALRQKLMSEGAASSAQAAAAG

SEQ ID NO: 4603 - protein, 1777 aa, Rickettsia akari str. Hartford
MSITGKLKSVLLTYSFIISISINLFTTGSEAAGNPPPPPPPPPLPPPGWTYQAASSNNTGSGGQTTQPESSKSTGSSKKSSSSTKIPEVHPPTTELGKRYAKLIDIHDRKQNLIIQFPKVIAYLIRQELTLQNLDTSVHNIITLFNKREDSILDNAKKIYQEFINDPYIAQFTNKNKQTGDFLDNKLFEESHEEAILRLLSLEQLDAQRKQDILSQQGNILEQLKFIKENSEILGSYGKTESTNISKKLPEELPKILSQQGDILGQLRFIKENSEILGAYGKTVSTDISKKLPKELPKILSQQGDILGQLKFINDNSEILLCGHSKAILKDKLKELSKQLDTISSNQLVGFILDENKINTNLKNVPFSAKKVREQVNNLNNEILEKIFLHDDGTITEQDLTRILQKYKETDLIKNLTKAIIYIDGNESNETVSKTLAKGLENTTPEQRGLIVDVLTHNTRIRKALITKIDRERRQERNQKLNKNTEGDPFVDALKKALVQRKSDPETIQKELERRKHETPRDLNAWDRVRQNMHNPNNQNDNPNTHDENNKGWKEDNQNAQDANNNDVDRITKAKNELEQAVNAATRKFSEMSSLLKDNTIKNATACQGYLKGAEDQLALAKEKGQELIENSVQAFKIIPKKSQDNMDDNWQNYLSPKEIIALNALSDETNTLKSKKNKAGKFTSTADASQFKAKQQKYHTLLSELQKIGIAKQQEKLVKDYVDEMLTNAKKAVGKIETTLEYLNKKKENKNDNAESSPLISKEIFEAREQLKKAEQKLERIKFKNTIAKQRKADSSDEDSDDEWDDDYDKKATKQKEELANKQKQELEDAQEEIKQAKKNLENAEVRDAERKQQEAAAKRQEELKRKQDEVNHKIVEDEVERKAENAQAERLEDMDAMFKNAKDEAEHKEKANRQRQEELKRKQDEVNRKIVEDEVKRKAENVQAERLEDMDAVFKNAKDEAEHKEKANRQRQEELKRKQDEVNRKIVEDEVERKAENAQAERLEDMDAMFKNAKDEAEYKEKANRQRQDEVNRKIVEDEVERKAENAQAERLEDMDAMFKNAKDEAEHKEKANRQRQEELKRKQDEVNHKIVEDEVERKAENAQAERLEDMDAMFKNAKDEAEHKEKANRQRQEELKRKQDEVNRKIVEDEVKRKAENVQAERLEDMDAVFKNAKDEAEHKEKANRQRQEELKRKQDEVNRKIVEDEVERKAENAQAERLEDMAAMFKNAKDEAEYKEKANRQRQDEVNRKIVEDEVERKAENAQAERLEDMDAMFKNAKDEAEHKEKANRQRQEELKRKQDEVNCKMVEDEVERKAENAEDEYLEDMAAMFKNAEDEAEYKEKANRQRQDEVNRKMVEDEVERKAENAEDEAEHKENENRQRQEEQNCQEQERKRLAAEEDEQTEKTTRKQEETEEEKLKNDIALEGEDEDIGVSFKTEAIVEQDEAAQRQQVSDDTSRKVAILVKATSTLHKPVHHNILSDRLKVSAIATGDEEPTIARGVWISGLYGMNKQGTWKNIPKYQGRTTGITIGADIEFINSHDVIGIAYSRLESKIKYNEKLGKTAVNVHLFSIYGLKELNKGFSLQAITSYGHNYIKNKSKSINNIVGKYQNNNFSFQTLLNYKYRTKDDLHFIPNIGFKYDYSRASSYKEYNVDIENLVIQKKSNQLFESSIGGKIVFKPIATISNVVLTPSLYGNIERHFNHKNTKVNAKATFKGQILQETIIIPKQPKLGYNIGSNMLMSRKNINVLLEYNYYTHRKYQSHQGLVKLKVNL

SEQ ID NO: 4604 - protein, 299 aa, Zea mays
MQMDSYNYNYASFFHDEAPSFYPHVAVPPSPELPIGLIASPGEPEPPFAPPMPASFQDYTGAVGVGVGVRAPFGGASVHGQAIDALGGGDGQREQSMAMAEDGEEPAPRRRQPAGGPAAAAVESSRGFRHMMRERQRREKLSQSYADLHALVAARSRGDKNSIVHAAAVYIHELRGARDQLQRRNEELKARILGHDAGQQCVKVQFEVDEPASAIDSMIGALRRLKGMDVRARGIRSSLSGRRLWTEMNVETTMAADEVERGVEEALLQEVERKQQQQLGAGSAAPGFPGPSSHVQNVF

SEQ ID NO: 4605 - protein, 355 aa, Solanum lycopersicum
MESTDSSTGTRHQPQLPPGFRFHPTDEELIVHYLKKRVAGAPIPVDIIGEIDLYKFDPWELPAKAIFGEQEWFFFSPRDRKYPNGARPNRAATSGYWKATGTDKPVFTSGGTQKVGVKKALVFYGGKPPKGVKTNWIMHEYRVVENKTNNKPLGCDNIVANKKGSLRLDDWVLCRIYKKNNTQRSIDDLHDMLGSIPQNVPNSILQGIKPSNYGTILLENESNMYDGIMNNTNDIINNNNRSIPQISSKRTMHGGLYWNNDEATTTTTTIDRNHSPNTKRFLVENNEDDGLNMNNISRITNHEQSSSIANFLSQFPQNPSIQQQQQQQEEVLGSLNDGVVFRQPYNQVTGMNWYS

SEQ ID NO: 4606 - protein, 318 aa, Oryza sativa (indica cultivar-group)
MASCRRGGGGDVDRIKGPWSPEEDEALQRLVGRHGARNWSLISKSIPGRSGKSCRLRWCNQLSPQVEHRPFTPEEDDTILRAHARFGNKWATIARLLAGRTDNAIKNHWNSTLKRKHHSSLLADDLRPLKRTTSDGHPTLSSAAAPGSPSGSDLSDSSHHSLPSQMPSSPPHLLLPQHVYRPVARAGGVVVPLPPPPPPPATSLSLSLSLPGLDHPHPDPSTPSEPAVQLQPPPPSQMPPPTPSCVRQEPPQMPFQLQPPPPPRPSAPFSAEFLAMMQEMIRIEVRNYMSGSAAVDPRSSPDNGVRAASRIMGMAKIE

SEQ ID NO: 4607 - protein, 307 aa, Oryza sativa (japonica cultivar-group)
MWDQLLIVYSRRREEPEDDFFDHFFSIPSAAAAGAGGFGGFGSGDHHPFPLALSLDAEGRRSRQAPPRRRPRRRQDGVTEFGFSQDRDPVQLAGLFAPVFGAAAGVQPPHLRAPPPPQVFHAQPKPGEGAMAAPQPQQPPAPRPKVRARRGQATDPHSIAERLRRERIAERMRALQDLVPNTNKTDRAAMLDEILDYVKFLRLQVKVLSMSRLGGAGAVAQLVADIPISVKGEASDSGSKQQIWEKWSTDGTEKQVAKLMEEDIGAAMQFLQSKALCMMPISLAMAIYDTQHSQDGHSVKPEPNTPS

SEQ ID NO: 4608 - protein, 59 aa, Thlaspi caerulescens
SRKNRMKRTVRVPAISSKIADIPPDEFSWRKYGQKPIKGSPHPRGYYKCSTFRGCPARK

SEQ ID NO: 4609 - protein, 291 aa, Arabidopsis thaliana
MSPATYLETSNWLFQENRGTKWTAEENKKFENALAFYDKDTPDRWSRVAAMLPGKTVGDVIKQYRELEEDVSDIEAGLIPIPGYASDSFTLDWGGYDGASGNNGFNMNGYYFSAAGGKRGSAARTAEHERKKGVPWTEEEHRQFLMGLKKYGKGDWRNIARNFVTTRTPTQVASHAQKYFIRQVNGGKDKRRSSIHDITTVNIPDSPDAAAADNATANAPCSPPSVGGNQRETSEWEGQTLYDETAAAFYNQNAFSETLLGMSSTPYMAKLQEQSFLNASQFESYNAYLQM

SEQ ID NO: 4610 - protein, 246 aa, Cucumis sativus
MGRGRVELKRIENKINRQVTFAKRRNGLLKKAYELSVLCDAEVALIIFSNRGKLYEFCSTSNMLKTLERYQKCSYGAVEVTKPAKELESSYREYLKLKSRFESLQRTQRNLLGEDLGPLNSKELEQLERQLVSSLKQVRSTKTQYMLDQLSDLQNKEQMLIETNRALQIKLEEISSRNNIRLTWDGGDQSMSYGPQNAQTQGFFQPLECNPTLQIGYTSAVSDQITSTTTPTHAQQVNGFLPGWML

SEQ ID NO: 4611 - protein, 532 aa, Oryza sativa (indica cultivar-group)
MGMSPEPCKSISDCSQQQSHHLTLTQQQDSTIICTNQELDYYYRFYDVDEAAFDGNEVELVSRFSKVTRMDHMISSPYQPTWSPAQAAVDVVGSSETSRVRKKRFWDVLESCKQKVEAMEAMDTPATATFRVGAGDGGGGGGGGAGGGGGGADGMRLVQLLVACAEAVACRDRAQAAALLRELQAGAPVHGTAFQRVASCFVQGLADRLPLAHPPALGPASMAFCIPPSSCAGRDGARGEALALAYELCPYLRFAHFVANACMLEAFEGESNVHVVDLGMTLGLDRGHQWRGLLDGLAARARGKPARVRVTGVGARMDTMRAIGRELEAYAEGLGMYLEFRGINRGLESLHIDDLGVDADEAVAINSVLELHSVVKESRGALNSVLQTIRKLSPRAFVLVEQDAGHNGPFFLGRFMEALHYYAALFDALDAALPRYDARRARVEQFHFGAEIRNVVGCEGAARVERHERADQWRRRMSRAGFQSVPIKMAAKAREWLDENAGGGGYTVAEEKGCLVLGWKGKPVIAASCWKC

SEQ ID NO: 4612 - protein, 615 aa, Arabidopsis thaliana
MAIQTQLPCDGDGVCMRCQVNPPSEETLTCGTCVTPWHVSCLLPESLASSTGDWECPDCSGVVVPSAAPGTGISGPESSGSVLVTAIRAIQADVTLTEAEKAKKRQRLMSGGGDDGVDDEEKKKLEIFCSICIQLPERPVTTPCGHNFCLKCFEKWAVGQGKLTCMICRSKIPRHVAKNPRINLALVSAIRLANVTKCSGEATAAKVHHIIRFTTERAVKTGKANAASGKFFVTIPRDHFGPIPAANDVTRNQGVLVGESWEDRQECRQWGVHFPHVAGIAGQAAVGAQSVALSGGYDDDEDHGEWFLYTGSGGRDLSGNKRVNKIQSSDQAFKNMNEALRLSCKMGYPVRVVRSWKEKRSAYAPAEGVRYDGVYRIEKCWSNVGVQGLHKMCRYLFVRCDNEPAPWTSDEHGDRPRPLPDVPELENATDLFVRKESPSWGFDEAEGRWKWMKSPPVSRMALDTEERKKNKRAKKGNNAMKARLLKEFSCQICRKVLSLPVTTPCAHNFCKACLEAKFAGITQLRDRSNGVRKLRAKKNIMTCPCCTTDLSEFLQNPQVNREMMEIIENFKKSEEEAEVAESSNISEEEGEEESEPPTKKIKMDKNSVGGTSLSA

SEQ ID NO: 4613 - protein, 240 aa, Medicago truncatula
MGRGRVQLKRIENKINRQVTFSKRRAGLLKKAHEISVLCDAEVALIVFSHKGKLFEYATDSCMEKILERYERYSYAERQLVANDSESQGNWTIEYTRLKAKIDLLQRNYRHYMGEDLGSMSLKELQSLEQQLDTALKLIRTRRNQVMYESISELQKKEKVIQEQNNMLAKKIKEKEKIAAQQQAQWEHPNHHGVNPNYLLQQQLPTLNMGGNYREEAPEMGRNELDLTLEPLYTCHLGCF

SEQ ID NO: 4614 - protein, 204 aa, Brassica napus
MKKLKLMDHSSCRRRYHDPPSQATARTLNNNNNNPKKKRVVKEDLDDDKIVSKHPTYRGVRMRQWGKWVSEIREPKKKSRIWLGTFSTAEMAARAHDVAALAIKGGSAHLNFPELVYQLPRPASADPKDIQAAAAAAAAAVAVDMEVETSTSSPVSSEPSSPATTTLADDAFSDLPDLLLDVNHNIDGFWDSFPYEEPFFSGTY

SEQ ID NO: 4615 - protein, 667 aa, Oryza sativa (indica cultivar-group)
MGRSRGVPNSGDDETNHRSKRRRVASSGDAPDSLSAACGGAGEGGGKKALYHCNYCNKDISGKIRIKCSKCPDFDLCVECFSVGAEVTPHRSNHPYRVMDNLSFPLICPDWNADEEILLLEGIEMYGLGNWAEVAEHVGTKTKAQCIDHYTTAYMNSPCYPLPDMSHVNGKNRKELLAMAKVQGESKKAAQYFQLDVRSIWAFVWIAEAELRVLPPPSSAGRQHTALPRDRSGHAWSRRRRGRAQPRHHRSSSLRLRRMDEKALGEAAEGRREVELADGWRRRSGSQSLSFPVRSASAVVYQLFNLHRVEDALGEGLAGRSPSHIAGGANKKASNVGQFKDGANVAKVEDGHVDRSIGVKKPRYSADEGPSLTELSGYNSKRHEFDPEYDNDAEQALAEMEFKETDSETDRELKLRVLRIYLSRLDERKRRKEFILERNLLFPNPLEKDLTNEDKEVYHRYKVFMRFLSKEEHEALVRSVLEERKIRRRIQELQECRSAGCRTLAEAKIHIEQKRKKEHEVNAQKAKESGQLLSNTKVVHKTNRPMKIESDGNLDQKKGGASLDSTGRDSPKTTGHAGTKHWDDWDIVGFPGAELLSTSEKNLCCQNRLLPNHYLKMQEVLMQEIFKGSVAKKEDAHVLFKVDPAKVDNVYDMVTKKLGTNEEAPTV

SEQ ID NO: 4616 - protein, 461 aa, Zea mays
  misc_feature (50)..(50): Xaa can be any naturally occurring amino acid
  misc_feature (415)..(415): Xaa can be any naturally occurring amino acid
  misc_feature (425)..(425): Xaa can be any naturally occurring amino acid
  misc_feature (448)..(448): Xaa can be any naturally occurring amino acid
MDCGPPDQLPPSSAPACFLNLNWDQSMAAATAGDHLDLVSSPASNSTAGXGLALHGISPQPQYGGTPLSSPRKLNLSMMGQFHHYPPMGHLDQFLADPGFAARAARLSGFDGRPGGSGYGGAVPGQFGLPDAGPIGGALRELELGNGRDESSVSDPASASAEMALKAPSDGNAKKRKASGKGKGKDGPGSTAATKEESSGKRCKSAEESNGAEENSGKGKAAAQSKSDNGGKKQGKDGASKPPEPPKDYIHVRARRGEATDSHSLAERVRREKISQRMKLLQDLVPGCNKVVGKAVMLDEIINYVQSLQRQVEFLSMKLATVNPQLDFNNLPNLLPKDMHQSCGPLQNSHFPLETSGAPLPYLNQGNPLIGCGLPNGMDNSQSSMHPLDPAFCRPMSSQQHPFLNGVSDAASQVXLSGKMTFRAXSTWIWGSRASRRWLPPPPTATTXFVANSAHENGALT

SEQ ID NO: 4617 - protein, 172 aa, Candida glabrata CBS 138
MGRYSVKRYKTKRRTKDLDLIHEELKSQEKIQQLLNQPLDETKPGLGQHYCIHCAKYFETGIALKTHLKGKIHRRRVKELKSIPYTQEVADAAAGVNLNKFLNSVEKFKNVDNQVKETNETLLKEHLDQTLENIETTEPTLPWADNNKKSETTEPSTTSTAVEVATEAVMEQ

SEQ ID NO: 4618 - protein, 159 aa, Brassica napus
MKIQCEVCEKAEAEVLCCSDEAALCKPCDIKVHEANKLFQRHHRVPLQKPSSTTSSTAPLCDICKERKGYFFCLDDRALLCNDCDGAIHICNSHQRFLLSGVQASDQSLTKSPGCSTNLSSETYQIQSKASLNSQYSSEENEAGNSGETDKTPSVILSP

SEQ ID NO: 4619 - protein, 246 aa, Zea mays
MDHQLFDDPFGSSISSLEAEIFSAAAQLPPSPPWPDIDLDDDYDIHDLSAPAANAATSSGGGYGSGGSGGHRKLSHNAYERGRRKQLNELYSSLRSLLPDADQTKKLSIPTTVSRVLKYIPELQKQVDNLERRKKELTNANCKPGVLKTTKAVTPIVSATCLNDTEIMVQVSLHSDVAATALPLSKCIKVLENEGLHLVSSSTYSSAFENKTFYSLHLQRSQRTMKEECPAFCEQLEKIVRKKAGA

SEQ ID NO: 4620 - protein, 406 aa, Lupinus cosentinii
STYTLSGPYPCYSSASNSYPFFPFLNPENASSSNNNNNNHTLLHDPLVHVPYNLPTHHNIHNTPIIQETLTNLAVSDAAATMPKQDPIMSGGGVHHHYGLSSLLTKKPAKKDRHSKIYTSQGLRDRRVRLSIEIARKFFDLQDMLGFDKASHTLEWLFNKSKRAIKELARSKKSNGSEGDANSFSSSSDREDCNEAVSGINNEQQGITIADQDSNAVKDMKKLKRAQNEPACVRAKMKESREKARARARERTSNKMCNTNNNNGRVVQVQDLKKKCIATTESNTHTLQQLRSPLQLEDCARSPNNKLLHPHFVSSSEVVPRDDNFNVIEESIVIRRKLKPSMMSSSHHHHHQNPMIPKEASFNNNTDYNSFTNLSPNWENANSGGNGINGRSNFCTIASMNLSTGM

SEQ ID NO: 4621 - protein, 431 aa, Lupinus texensis
  misc_feature (323)..(323): Xaa can be any naturally occurring amino acid
STYTSSGPYTFHPSSNSYPFFPFLNPENASSSNNNTLLHDPLVHVPYNIPTHHYIHSTPIIQETLTNLAVSEAHAAAMPKQDQIISGGSGVYNHYGFSSLLTKKPAKKDRHSKIYTSQGLRDRRVRLSIGISRKLFDLQDMLGFDKASNTLEWLFNKSKKAIKELARSKNSNIIEGDAKSFSYSSDCEDCNEVVSGINNEQGIINADHDTLNLQQQGLDSNAVKEMRKLKSAQKEPACVRTKIKESREKARERARERTSNKMSNTTSNNWRVMQVQDLKKKCIATTENNTETLQQMRSPLQLEDCARSPNQMIQTHPHHHLVXSSEAPRDNNFNVIEESIVIRRKLKPSMVSSSHHHHQNLMIPKEASFNNTDYNSFTNLSPNWDNASNGGSGINGRSTFCTIASMNLSTGMCVYYMNMLLFETFHFDDII

SEQ ID NO: 4622 - protein, 146 aa, Glycine max
  misc_feature (28)..(28): Xaa can be any naturally occurring amino acid
  misc_feature (72)..(72): Xaa can be any naturally occurring amino acid
DPNIRTIELEAFFVHIKRASNMVKHFSXPVSMFAPPKSTPGVPGAPAPPASKFKTQLCQNFPQGSCSFAERXPFAHGAVEKRKSGVGVCFSICISQGMVIMINIAVEGVRGYYMALRLSMDVRVMQYLGNVPKFFWAKAEKKKKKK

SEQ ID NO: 4623 - protein, 437 aa, Genista tenera
  misc_feature (88)..(88): Xaa can be any naturally occurring amino acid
STYTSSGPYPCFPSSSSNSYPFFPFLYPENATSSNNNNTLLHDPLAHVPYNIPTHHHIHNTPIIQETLTNLAVSDAHAAAMPKQDPIXNGGGVHHHYGLSSLLTKKPAKKDRHSKIYTSQGLRDRRVRLSIEIARKFFDLQDMLGFDKASNTLEWLFNKSKKAIKKLARSNNSNISEGDAKSLSSSSDCEDCNEVVSGINNEQIGIITADHDALNLQQQGLDSNAVKEMRKLKRAQKEPACVRAKMKESREKARARARERTSNKMSNTTSNIGRVVQDLKKKCIATTENNTHTLQQLRSPLHLEDCARSPNKMIHTHPHHHLVGISEAPRDDNFNVIEESIVIRRKLKPSMMSSSHHHHHHQNLMIPKEASFNNNNNTDYNSFTNLSPNWNNASNGGSDINGRSNFCTIASMNLSTGMCVCCMKMIFFETFHFDDII

SEQ ID NO: 4624 - protein, 399 aa, Zea mays
MGRHSCCYKQKLRKGLWSPEEDEKLMNHITKHGHGCWSSIPKLAGLQRCGKSCRLRWINYLRPDLKRGAFSQDEEDLIIELHAVLGNRWSQIAAQLPGRTDNEIKNLWNSCIKKKLRQKGIDPNTHKPLTEADRSGAAPTISTERTSGSSEINPSSAGALGNLSHLLSETAQSSMLMPVYDKNRAETPNLARPKVPPKELFLEQLTAGHESPSTCRSSGQTLYFPFQQPLGYNSESGSGDGANMNSLWFNQSDFNCSTISTVMPPVSPSALSTSMGLNLPPDNPRHGGTGIGSTAVDSFYWGCVFQWTDIGQEKDTRAHLVEELKWPDLLHGTFAETTTAMQNQSQTLYDDVIKAESQFSMEGICASWFQNQQPQQQLQATPDMYDKDLQRMQLSFENI

SEQ ID NO: 4625 - protein, 246 aa, Arabidopsis thaliana
MEGGASNEVAESSKKIGRGKIEIKRIENTTNRQVTFCKRRNGLLKKAYELSVLCDAEVALVIFSTRGRLYEYANNSVRGTIERYKKACSDAVNPPTITEANTQYYQQEASKLRRQIRDIQNLNRHILGESLGSLNFKELKNLESRLEKGISRVRSKKHEMLVAEIEYMQKREIELQNDNMYLRSKITERTGLQQQESSVIHQGTVYESGVTSSHQSGQYNRNYIAVNLLEPNQNSSNQDQPPLQLV

SEQ ID NO: 4626 - protein, 389 aa, Arabidopsis thaliana
MTLRSLILEMRSRPHRVVHDLAAAAAADSTSVSSQDYRWSEIPEELLREILIRVEAADGGGWPSRRSVVACAGVCRGWRLLMNETVVVPEISSKLTFPISLKQPGPRDSLVQCFIKRNRITQSYHLYLGLTNSLTDDGKFLLAACKLKHTTCTDYIISLRSDDMSRRSQAYVGKVRSNFLGTKFTVFDGNLLPSTGAAKLRKSRSYNPAKVSAKVPLGSYPVAHITYELNVLGSRGPRKMQCLMDTIPTSTMEPQGVASEPSEFPLLGTRSTLSRSQSKPLRSSSSHLKETPLVLSNKTPRWHEQLRCWCLNFHGRVTVASVKNFQLVAAGASCGSGTGMSPERQSERIILQFGKVGKDMFTMDYGYPISAFQAFAICLSSFETRIACE

SEQ ID NO: 4627 - protein, 225 aa, Gossypium hirsutum
MRKGRGATAAADAAMKPAVEANGSVKELRYRGVRKRPWGRFAAEIRDPLKKTRVWLGTFDSAEEAARAYDAAAITFRGNKAKTNFPFNSSDFPAFGIDRHHRRNNEGFIADGHRFHQTGGDYEDPEVNPQRPARSSMSSTVESFSGPRPTQPPRKPSDFEAVSTRKYHPKMPRMAPEDCRSDCDSSSSVVDDGDDDNVSSSRRKILPFDLNFPPLDEVDDLTLSL

SEQ ID NO: 4628 - protein, 219 aa, Prunus armeniaca
MEKTECSEAENFGSVTTSLEPQATAKRKKAKSKNQRRFSDEQIRLLESIFEADSKLEPRRKVQVARELGLQPRQVAIWFQNRRARWKSKQIEQDFRTLRADYDNLASRFESLKEEKQSLLMQMQKLNELVGKPSQGLEGNIMVDGSRLQEELEPRGVIQSHKNNTSNDVGCHGDEIHELLSMAHVDASSLSPQDWHRFEPSILFDPSRFTSSHWLNFWT

SEQ ID NO: 4629 - protein, 208 aa, Brassica napus
MSSMNGGFQENTNWIFQEVKDAMWTVEENKLFEKALAVLGDKDDLESWSNIAALIPGKSVDDVIKRYKKLEDDISDIEAGLVPDPGYCSDASAGDYFFGLENSGYGYGYGYGYNYVVGGKRSSPATSDGFNLPMPEKERKKGVPWTEEEHRRFLMGLKKYGKGDWRNIARNFVTTRTPTQVASHAQKYFIRQLTDCKDKRRSSIHDIT

SEQ ID NO: 4630 - protein, 315 aa, Oryza sativa (indica cultivar-group)
MACMAGVDSRGGEALSPAAVASGRGRSNHEQLKMISNNSTNEELGGGGAAAAVASSRHWSASTESRIVRVSRVFGGKDRHSKVRTVKGLRDRRVRLSVPTAIQLYDLQDRLGLSQPSKVVDWLINAAQAEIDKLPPLQFPPHDHDLVAAAASSMAPPPFANGGDGHHGASASSMLEDGDKAAGGGGMKAFMSLSNSLGLLNAATMPATLAAHHHHHHHAAAYYAAAESWGNGGNGGHHHDVSHGVSPSAHNSPFPSLLSLAPGSHHQFVFYSPEGGGFAVKEAAAEQFPVDSLDHSQGQLTLSSARSFLHSGSQG

SEQ ID NO: 4631 - protein, 342 aa, Arabidopsis thaliana
NYLPLISSLHVTKTIRFQIMDRRNPFQHHHHHHQLHHHLIQQQQLPPPPLSTTATMDPGGGGGGGERIPQWSIEETKELLAIREELDQTFMETKRNKLLWEVVAAKMADKGFVRSAEQCKSKWKNLVTRYKACETTEPDAIRQQFPFYNEIQSIFEARMQRMLWSEATEPSTSSKRKHHQFSSDDEEEEVDEPNQDINEELLSLVETQKRETEVITTSTSTNPRKRAKKGKGVASGTKAETAGNTLKDILEEFMRQTVKMEKEWRDAWEMKEIEREKREKEWRRRMAELEEERAATERRWMEREEERRLREEARAQKRDSLIDALLNRLNRDHNDDHHNQGF

SEQ ID NO: 4632 - protein, 301 aa, Zea mays
MDTGRKRTAPEGANGAGGPKRARESETTGVGSKSKPCTKFFSTAGCPFGASCHFLHNFPGGYQAVSKMTNLGGPPVPAPPGRMPMGPGGPDGPPSPAVKTRMCNKYNTAEGCKWGSKCHFAHGERELGKPLQMDNPMGPPPMGPGPNGHFMPPPMPFPDMVPPSTFGASATAKISVDASLAGAIIGKGGTNTKHISRVTGAKLAIRDNEADPNHKNIELEGTFDQIKHASAMVTELIVRISGKPPPQAKNNPGRGPGSHAGGPGSNFKTKLCENFNKGSCTFGDRCHFAHGEGELRKPAAA

SEQ ID NO: 4633 - protein, 185 aa, Silene latifolia
LELPWKAPMGEKEWYFFSLRDRKYPTGLRTNRATEAGYWKATGKDREIHSSKTCSLVGMKKTLVFYRGRAPKGEKSNWVMHEYRLEGKFAYHYLSRSSKDEWVISRVFQKTGPGAAPTSSAGGTTGPKKARNGMSFYGEVCSSPSSVSQQLPPLLDSSPYGDCCSFDDPDDSATNQERARVLLLQ

SEQ ID NO: 4634 - protein, 164 aa, Cleisostoma racemiferum
IENKINRQVTFAKRRNGLLKKAYELSVLCDAEVALIIFSNRGKLYEFCSSTSMLKTLEKYQKCNFGSPESTIISRETQSSQQEYLKLKSRVEALQRSQRNLLGEDLGPLGSKELEQLERQLDSSLKQIRSTRTQFMLDQLADLQRREHMLCEANKALKRRFEES

SEQ ID NO: 4635 - protein, 253 aa, Oryza sativa (japonica cultivar-group)
MSGTPADGGGGGGGGGGGTGDDWFLDCGILEDLPAAACGAFPWNASPSCSNPSVEVSSYVNTTSYVLKEPGSNKRVRSGSCGRPTSKASREKIRRDKMNDRFLELGTTLEPGKPVKSDKAAILSDATRMVIQLRAEAKQLKDTNESLEDKIKELKAEKDELRDEKQKLKVEKETLEQQVKILTATPAYMPHPTLMPAPYPQAPLAPFHHAQGQAAGQKLMMPFVGYPGYPMWQFMPPSEVDTSKDSEACPPVA

SEQ ID NO: 4636 - protein, 231 aa, Populus suaveolens
MVLAGSNSFSADKQESSLSSLLSDSSGSQQDSPCSNEKVLLAASRPKKRAGRRIFKETRHPIFRGVRKRNGDKWVCELREPNKKSRIWLGTYPTPEMAARAHDVAALAFRGKSACLNFADSAWRLPAPISNEAKDIRRAAGEAAELFRTSDLGGQVMEDFTTEGRGEVCSSSNDDIRDLPSENVSYIDEEAEFNMPWLLANMAEGLLLSPPHYTGDWNDGEIDADWSLWSS

SEQ ID NO: 4637 - protein, 187 aa, Arabidopsis thaliana
MKLSSPPVTNNEPTATASAVKSCGGGGKETSSSTTRHPVYHGVRKRRWGKWVSEIREPRKKSRIWLGSFPVPEMAAKAYDVAAFCLKGRKAQLNFPEEIEDLPRPSTCTPRDIQVAAAKAANAVKIIKMGDDDVAGIDDGDDFWEGIELPELMMSGGGWSPEPFVAGDDATWLVDGDLYQYQFMACL

SEQ ID NO: 4638 - protein, 165 aa, Arabidopsis thaliana
SASRASNEDNDDENGSTRKKLRLSKDQSAFLEDSFKEHSTLNPKQKIALAKQLNLRPRQVEVWFQNRRARTKLKQTEVDCEYLKRCCESLTEENRRLQKEVKELRTLKTSTPFYMQLPATTLTMCPSCERVATSAAQPSTSAAHNLCLSTSSLIPVKPRPAKQVS

SEQ ID NO: 4639 - protein, 140 aa, Viola pubescens
VAVIVFSHKGKLFEYSTNSGMEKILERYERYSYAERQLVAPDFDSQGNWTLEYNRLKAKVELLQRDHRHYMGEDLESMSLKELQNLEQQLDTALKHIRTRKNQLMYDSISELQRKEKAIQEQNNILAKQIKEKEKTITAT

SEQ ID NO: 4640 - protein, 208 aa, Arabidopsis thaliana
NSTISSTISGKRSEREGISGTGVGSGDDHDEITPDRGYSRGTSDEEEDGGETSRKKLRLSKDQSAFLEETFKEHNTLNPKQKLALAKKLNLTARQVEVWFQNRRARTKLKQTEVDCEYLKRCVEKLTEENRRLQKEAMELRTLKLSPQFYGQMTPPTTLIMCPSCERVGGPSSSNHHHNHRPVSINPWVACAGQVAHGLNFEALRPRS

SEQ ID NO: 4641 - protein, 315 aa, Arabidopsis thaliana
MSERDDGLGLSLSLSLGFNQKDPSSRLNPMPLASYASSSHMQHMQQSNYNHPQKIQNTWINMFQSSERNSDMRSFLRGIDVNRAPSTVVVDVEDEGAGVSSPNSTVSSVMSGKKSERELMAAAGAVGGGRVEDNEIERASCSLGGGSDDEDGSGNGDDSSRKKLRLSKEQALVLEETFKEHSTLNPKQKMALAKQLNLRTRQVEVWFQNRRQRTKLKQTEVDCEYLKRCCENLTDENRRLQKEVSELRALKLSPHLYMHMKPPTTLTMCPSCERVAVTSSPSSVAPPVMNSSSPMGPMSPWAAMPLRQRPAAGSH

SEQ ID NO: 4642 - protein, 329 aa, Glycine max
MAASGSSFSNITSFLRNQQPSSQPLDSSLFLSAPSIFVSGSRSMVSFEAEGGKGCNGSFFRAFDMDDNGDECMDEYFHKPEKKRRLSMNQVQFLEKSFEEENKLEPERKTKLAKDLGLRPRQVAIWFQNRRARWKTKTLEKDYEALHASFENLKSNYDSLLKEKDNLKAEVASLNEKVLARGKQEGHMKQQAESEEETKRLLHLQEQEPPQRLLLESVSEGEGSKVSSVVGGCKQEDISSARSDILDSDSPHYTDGVNSALLEHGDSSYVFEHDQSDMSQDEEDNLSKSLYPSYLFPKLEEDVDYSDPPESSCNFGFSEEDHALWTWAY

SEQ ID NO: 4643 - protein, 248 aa, Cleome spinosa
MGRGRVELKRIENKINRQVTFAKRRNGLLKKAYELSVLCDAEVALIIFSNRGKLYEFCSSSNMLKTLERYQKCSYGSIEVNNRPAKELENSYREYLKLKSRYEGLHRQQRNLLGEDLGPLNSKELEQLERQLDSSLKQVRSIKTQSMLDELSDLQNKEQMLLEANRALSMKLEEMVGARTHQFGGAWEGSEQNVSYGHQAQSQGLFQPLECNPTLQIGYNNPVCSEQMAATTQAPVQAGNGYIPGWML

SEQ ID NO: 4644 - protein, 260 aa, Zea mays
MEAGRMDQPFMAAINSQPFVEDIEPVKKASGDMPATTGSGCFECNICLDFASEPVVTFCGHLYCWPCIYEWLRPGVESAASDNSSSARRQCPVCKATLSTDTLVPLYGRGGNSKKSLDGMAIPRRPMVHRETVEQQNAQSNVNDQHYHQSMEDNSQRQPLLQAHHHPIPTGFDFIYPPAPVGRGLIHSTAGGVLGGMAEIVLPLALRGQMPASLYYTNPYHAATQNVDPRLRRHQMEIERSLHQIWFFLCVFVVLCLLLF

SEQ ID NO: 4645 - protein, 277 aa, Oryza sativa (indica cultivar-group)
MEPGCGEGGGGGGGRDERVPQWGAQETRELIAARGEMERESAAAAAARRSAKTLWEAVSARLRERGYRRTAEQCKCKWKNLVNRYKGKETSDPENGRQCPFFDELHAVFTERARTMQQQLLESESGPSVKKKLKRPSGDLSSEDSDDEEDGGGDSGDEKPIRSRKRKIADKRQQSQRMAEKSRTSISSTHELLQDFLVQQQRMDIQWHEMMERRSQERIVFEQEWRQSMQKLEQERLMLEHTWMEREEQRRMREEARAEKRDALLTTLLNKVLQEDL

SEQ ID NO: 4646 - protein, 119 aa, Musa x paradisiaca
ACAEAVQPVNLKAADALVKQITLLTTSQGGAMRKVAGYFAEALARRIYRPQPHRGVGCSSQDSAALDNILHVHFYESSPYLKFAHFTANQAILEALRANSFKPAGLATLSPLTPELFAF

SEQ ID NO: 4647 - protein, 392 aa, Oryza sativa (japonica cultivar-group)
MPSYAHHHSSLGDDEEENGRFLSLCLLGFWNFGNLWFLLCVYVGAFWTEKDGKMDALKSSCRSEEAADEGAAAAPSAWGMVERDGFSVEDLLDLEEFCEAEKDAAEENEQALALVAAPEEEKSKDDSQPSSVVTYELVAPPPPPPEIVDLPAHDVEELEWVSRIMDDSLSELPPPPQPPASVVASLAARPPQPRQLQRRPQDGAYRALPPASYPVRTPTICALSTEALVPVKAKRSKRSRATAWSLSGAPPFSDSTSSSSTTTTSSCSSSASFSSFSPLLKFEWHPLGGTSDLPDDHLLPPGEEVQARHCGVQKTPQWRAGPEGAKTLCNACGVRYKSGRLLPEYRPACSPTFVSAIHSNSHRKVLEMRRKKEVGSGLLTAAAAAAPAVASF

SEQ ID NO: 4648 - protein, 239 aa, Arabidopsis thaliana
MGLSYSSNPTQLDNDQKKPSPATAAAATRPQPPELALRCPRCDSTNTKFCYYNNYSLTQPRYFCKSCRRYWTKGGTLRNIPVGGGCRKNKRSTSSAARSLRTTPEPASHDGKVFSAAGFNGYSNNEHIDLSLAFALLNKQHPGSSSQLGFHSELGSSHQSDMEGMFGTSQQKENATYAFGNGSSGLGDPSRVLWGFPWQMNGESFGMMNIGGGGGHVDQIDSGREMWTNMNYINSGALM

SEQ ID NO: 4649 - protein, 222 aa, Euryale ferox
MGRGKIEIKRMENTTNRQVTFSKRRAGIIKKAKELTVLCDAHVSLILFSSTQKLFEYCSPTTTMKKMIDRYQQVTGTNLWDSHYESMQKEFNMLKEKNERLRKSIRQRIGEDLDELNHSELCGLEQNLSEALKKIRLTLENKIKRQIDTCRKKIRLADDPRNKGFRELQEEINCSFDGSEDKYESMMVVRNNDHVQLFPVGVKPNHPNLHEREYGCHDLSLG

SEQ ID NO: 4650 - protein, 251 aa, Arabidopsis thaliana
MMNRSMSFTGVSDHYHLTQKSPTTTNNMNDQDQVGEEDNLSDDGSHMMLGEKKKRLNLEQVRALEKSFELGNKLEPERKMQLAKALGLQPRQIAIWFQNRRARWKTKQLERDYDSLKKQFDVLKSDNDSLLAHNKKLHAELVALKKHDRKESAKIKREFAEASWSNNGSTENNHNNNSSDANHVSMIKDLFPSSIRSATATTASTHIDHEIVQDQDQGFCNMFNGIDETTSASYWAWPDQQQQHHNHHQFN

SEQ ID NO: 4651 - protein, 274 aa, Arabidopsis thaliana
MGFDDTCNTGLVLGLGPSPISNNYNSTIRQSSVYKLEPSLTLCLSGDPSVTVVTGADQLCRQTSSHSGVSSFSSGRVVKRERDGGEESPVEEEMTERVISDYHEDEEGISARKKLRLTKQQSALLEESFKDHSTLNPKQKQVLARQLNLRPRQVEVWFQNRRARTKLKQTEVDCEFLKKCCETLADENIRLQKEIQELKTLKLTQPFYMHMPASTLTKCPSCERIGGGGGGNGGGGGGSGATAVIVDGSTAKGAFSISSKPHFFNPFTNPSAAC

SEQ ID NO: 4652 - protein, 286 aa, Oryza sativa (japonica cultivar-group)
MDQLCTSGGSDSDKSLAAGDEPAVRVRGEVEAEAAAAAAAAEAQGGGCFDCNICLDFATEPVVTLCGHLYCWPCIYEWLHPGGDDDGSNGDASSTRRRPCPVCKAAVSPDTLVPLYGRGRGGSSKRARSGSAIPRRPIVHREPVERQSDRLGDDDGGHRHGSTGSSPPVRSPWHANHHAAAASTPAPAPARLFDVVYPPPPAAVGGVGMFHSTTTTTGGMLGGMALAVLPWVSRGQSPATAAASAYYTSPYHMSPRLRRQHMEVERSLHQIWFFLVVFAVLCLLLF

SEQ ID NO: 4653 - protein, 315 aa, Zea mays
MTSFMADTQCDDIDMDMDMAQLEWLSGLFDDASIPHEPAFPGAAPIIKSSALAAGALLPPDKMEDALLFRSSSPISVLEHGSFNNANGGGGGCSASSESSSASSSSESFSGSGSGSGEGHAWSAPVSPPPVLVIPARARSKRSRPSAFTRAGAEAPTILVPTPMYSSGPSHSDPESIAESSPHPAPPMKKKKKAKKPPAPPAPASSDDNDGDADYEEGGERAEPQGGAVRRCTHCQIEKTPQWRAGPLGPKTLCNACGVRYKSGRLFPEYRPAASPTFVPSIHSNSHKKVVEMRQKAVRSGDPSCDLLQFIRRRD

SEQ ID NO: 4654 - protein, 283 aa, Physcomitrella patens
MGRGKIEIKKIENTTSRQVTFSKRRGGLLKKAHELAVLCDAEVALVIFSSTGKLFEYASSGSMRDIIERYKKSPNGAMKSGASTDFLGREVVKLQEQVERLKSSQRRMLGEDLSALKVPDLLQLEQQLDLGASRVRARKNQLILEEIEGLQKKEQELMVANEDLRKKIADAEAVARANLSEARPESPRHLARTLSRDVSASSHPAATVYPHPNLRDVQRSQTSLQLGMFSSESYPPSSSRWPSEQQFPSASEGCAGESSMKWDHPHYHIQNRLHANILPSVRI

SEQ ID NO: 4655 - protein, 323 aa, Solanum lycopersicum
MAPGILYGGSSNFDGVFTQKQRDVFSSSTAPKGHLGSLFAPASSSSNFLGSSSMVSFRGVNGGKRSFFDSFDQDDNEADELGEYLHQAEKKRRLTDNQVQFLEKSFGEENKLEPERKVQLAKELGLQPRQIAIWFQNRRARWKTKQLEKDYDELRNRYDTLKSNYNNLLKEKEDLRTEVFRLTGKLFIKEKGNGQLDLRDEHKHSNALAKETVVDPMSNVPALVVKHQQEDLSSAKSDVFDSESPRYTSRMHSSVVDQDDSARAFETDQSDSSQDDDENFSKNMLSTANLLGKDADDDYPATSSNLSYFGFPVEDQGFGFWTY

SEQ ID NO: 4656 - protein, 178 aa, Lupinus bracteolaris
SSSSSYHPFAFFNPENASSNNTFSHDLLSFPYNTPTTHHYHAPIPETPSNFADCAASAAMFKNDVSGSNFGFSNFLAKKPASKKDRHSKIHTSQGLRDRRVRLSIEIARKFFDLQDMLGFDKASNTLEWLFNKSKKAMKELARSKNSSSGVAANSFSSSDSECEVVSMINQDSIDATP

SEQ ID NO: 4657 - protein, 200 aa, Loranthus delavayi
NGIFKKAQELTVLCDAAVSLIMFSNTGKCHEYTSPTTTTKVIYDQYQKALGIDLWSSHYEKMQENLKKLKEVNSRLRREIRQRMGEDLDDLTMKELIDLQQKMQASLDVVRERKYHVIKTQTDTCRKKVKSLEEIYGTLLLDIEAKYEDPHYGLVDNGGGDYESAASFVHGPANMYFGLHSNAPNLHLEQGYDSQDLRLA

SEQ ID NO: 4658 - protein, 154 aa, Pisum sativum
MKGGKSKGESKKAETKLAVNKKGAPATKGGKKPAKGKEPKDPNKPKRPPSAFFVFMEDFRKQFKKGNADNKAVSAVGKAAGAKWKSMTEAEKAPYAAKAEKRKAEYEKSMKSYNKKQAEGPAAVEEEEESEKSESEVHDENDDEEESEEEDDDE

SEQ ID NO: 4659 - protein, 137 aa, Brassica napus
RDAWAQAWALARQLNLRPRQVEVWFQNRRARTKLKQTEVDCEFLKKCCETLTDENRRLQKELQDLKALKMSQPFYMHMPAATLTMCPSCERLGGGGGGAAGGGGGTAEVNGGTAKGAFSVVTKPRFFNPLTSPSTAC

SEQ ID NO: 4660 - protein, 221 aa, Ginkgo biloba
MGRGKIEMKRIENTTNRQVTFCKRRNGLLKKAYELSVLCDAEVALIVFSSRGRLYEFANNSVKRTIDRYKKTCADNSHGGAISECNSQYWQQEAGKLRQQIDILQNANRHLMGDALTSLSVKELKQLEIRLERGISRVRSKKNEMLLEEIEIMQRREHILLAENQFLRTKIAECESSQNANMLPGPEFDALPGFDSRHFLHASIMDAHHYAQQDQTALQLG

SEQ ID NO: 4661 - protein, 218 aa, Ginkgo biloba
MVRGKTQMKRNENATSRQVTFSKRRNGLLKKAYEFSVLCDAEVGLIIFSPRGKLYEFASASMQKMLERYQKYSDDMNANKKTNEQDAQHWKEEIENMGQRIEILEATQRQMLGECLASCSMKELNHLENQVERGLNHIRARKTEILMEQIEQLKRKERFLTEENAILRQKCIQPHYADASISTTPTIGYGSIQHPEVETQLLMRPPEVQDHIQLKGSN

SEQ ID NO: 4662 - protein, 299 aa, Schizosaccharomyces pombe 972h-
MNNQLENVFRFDEEKERAKIRESPWKHDPEFFRSVKISAVALLKMLRHVSQGMPLEVMGYVQGKVEGASLIILDSFALPVEGTETRVNAHEEAQEYSVQYHTLCKSVYRHENVIGWYHSHPNYGCWLSGVDVETQRQNQKYQDPFVAVVLDPKRSLESPYVNIGAFRTYPVGNDGSIRTKSRHHPSVLFKNLPSSKIEDAGAHAEAYYSLPITYFHSKAEKKVTEFLRNRNWSRSITECSILQNNEFLHDSEKLIDHLIHETGNNELPVASAYEQSKACCNELSTFLSQIDVQDKLFKE

SEQ ID NO: 4663 - protein, 428 aa, Oryza sativa (indica cultivar-group)
MGRHSCCYKQKLRKGLWSPEEDEKLMNHITKHGHGCWSTVPKLAGLQRCGKSCRLRWINYLRPDLKRGAFSQEEEDLIVELHAVLGNRWSQIATRLPGRTDNEIKNLWNSCIKKKLRQKGIDPNTHKPLAEVDRSKATPTISNDRTSESSDVDPSSGVALHNLSHLLSETAQSSELLPVKVTKPRTQAPGLARLKVPPKELFLDQLTSGHENLPSCRSSGPIPNFPFQQLLCYNNDFNSMDVGNRNSLWYNQNESSSSTISTVMPPVSPSTLSTSTGLNPSPDNANSRGTGIHNSQFYWDTNNPSSSSSTGSSGNNGLGFELQSTSSLLETNIFPWTDLAPEKDSQAQLEEELKWPDLLHGTFSEMPAPMQNLSQSLYEDVVKAESQFNMEGLCAAWSQNLLPQQHLPVVSDMYDKDLQRMSLSFENI

SEQ ID NO: 4664 - protein, 221 aa, Nymphaea tetragona
MGRGKIEIMRIENTTNRQVTFSKRRAGIIKKAKELTVLCDAHASLILFSSTHKLFEYCSPTTTMKKMIDRYQQVTGTNLWDSHYESMQKEFNKLKEKNERLRKSIRQRIGEDLDELNHSELCGLEQNLSEALKKIRLTLENKIKRQIDTCRKKIRLADDPRNKGFRELQEEINCSFDGSEDNYESMMVIRDSDAQPCPVRVQSSHPNLHERGYGCHDLVLG

SEQ ID NO: 4665 - protein, 230 aa, Cabomba caroliniana
MGRGKIEIKRIENTTNRQVTFSKRRAGIIKKAKELTVLCDANVSLILFSSTNKFFEYCSPTTTMKAMVDRYQQVSGTNLWDAQYESMQQKLAELKEKNEKLRKSIRQRYGNELDGLSYTELCGLEQNLSDALQKIRSTFVAKIGRSIDTSKKKLRSAHKNKIAVFGDVHEEMGCAYEESEEDYETMVAMSSGSGSGAQLFPIQLPPAGAAAAPHLNLHQRGYGCHDLRLA

SEQ ID NO: 4666 - protein, 340 aa, Oryza sativa
  misc_feature (34)..(34): Xaa can be any naturally occurring amino acid
MSWSLSLSMVEARLPPGFRFHPRDDELVVDYLSXGGGAAGAGCPTPTLIDVDLNKCEPWDLPEIACIGGKEWYFYNLKDRKYARGQRTNRATESGYWKATGKDREITRKGSLVGMRKTLVFYRGRAPKGERTDWVMHEFRQELDHANHHHHLKYMQEGWVLCRVFYKSRTEAVAAPTMESTLPPRYINGGTSRSPLPPLVDSSISFNHGGYEEVLPCFSSSHHQQPSPASMNASAAKATLPRPLLGKERKQTQKGKYMGLSLAHVKFLHRPPERPNYYTWTLSLSFHSERNSSCSPPPPAKGIDRMGTSVQVTPLSGAYGEGPLCYLLADLVLGQRCWAC

SEQ ID NO: 4667 - protein, 236 aa, Oryza sativa (japonica cultivar-group)
MDGGGDPVDEFLIGGGGEDGDLGVFCDGVPTLPCDGGLGIDDVSGDTCCLDQSVLGKRGRDESSSSGPKSKACREKIRRDRLNDRFLELSSVINPDKQAKLDKANILSDAARLLAELRGEAEKLKESNEKLRETIKDLKVEKNELRDEKVTLKAEKERLEQQVKALSVAPTGFVPHLPHPAAFHPAAFPPFIPPYQALGNKNAPTPAAFQGMAMWQWLPPTAVDTTQDPKLWPPNA

SEQ ID NO: 4668 - protein, 629 aa, Oryza sativa (japonica cultivar-group)
MEKASKAKAEAAKGAHTHCRCLLLLPPMDTLFRLVSLQAASEQQQQQQQSASYNSRSTTSSGSRSSSHQTNASYSYYHHSSNSGGGGGGGGGYYYGGQQPPPSQYYYLEPYQEECGNAPHHQLYMDEDFSSSSSSRHFHHGARVQQQQPPASSTPTGTAPTPPLSTSSTAAGAGHGLFEAADLSFPPDLNLDFSSPASSSGGGTASSGAVGGGGGGRWASQLLLECARSVAARDSQRVQQLMWMLNELASPYGDVEQKLASYFLQGLFARLTASGPRTLRTLAAASDRNTSFDSTRRTALRFQELSPWSSFGHVAANGAILESFLEVAAAASSETQRFHILDLSNTFCTQWPTLLEALATRSADETPHLSITTVVSAAPSAPTAAVQRVMREIGQRMEKFARLMGVPFRFRAVHHSGDLAELDLDALDLREGGATTALAVNCVNSLRGVVPGRARRRDAFAASLRRLDPRVVTVVEEEADLVASDPDASSATEEGGDTEAAFLKVFGEGLRFFSAYMDSLEESFPKTSNERLALERGAGRAIVDLVSCPASESMERRETAASWARRMRSAGFSPVAFSEDVADDVRSLLRRYREGWSMREAGTDDSAAGAGVFLAWKEQPLVWASAWRP

SEQ ID NO: 4669 - protein, 284 aa, Physcomitrella patens
MGRGKIEIKKIENTTSRQVTFSKRRGGLLKKAHELAVLCDAEVALVIFSSTGKLFEYASSGSIRDIIDRYKKGSDGMQNGARNDFMGCEVVKLREQLEQLKASHRHMLGEDLSLLKVPDLLQLEQQLDLGASRVRARKNQLILEEVESLRRKEHELLIANEDLRQKLADAQGIADAVTARANVSESPRPLTSALTRDIVMSSQQQEVTVHPHPNLRDAQRSQTSLQLGMFSSESYLPSSSRGPSEHPIPVGPEGCAGESAMRWEHPHFHSQNRLHANISPSVRI

SEQ ID NO: 4670 - protein, 113 aa, Glycine max
CRTKLKQTEVDCEYLKNCCENLTEENRRLQKEVQELRALKLSPQLYMNMNPPTTLTMCPSCERVAVSSTSFSSSATMPSAPPPANLNPAGPTIQRPVPVNPWAAMLNQHRGRP

SEQ ID NO: 4671 - protein, 367 aa, Solanum lycopersicum
MDALNSYASSAAMAQQTWELENNIVTTDAPSGSAPENSASDAIFHYDDAAQTKFQREKPWTSDPHYFKRVKISALALLKMVVHARSGGTIEVMGLMQGKTDGDAIIVMDAFALPVEGTETRVNAQADAYEYMVEYSQTNKQAGRLENVVGWYHSHPGYGCWLSGIDVTTQMLNQQYQEPFLAVVIDPTRTVSAGKVEIGAFRTYPEGYKPPDDPISEYQTIPLNKIEDFGVHCKQYYSLDITYFKSSLDCHLLDLLWNKYWVNTLSSSPLLENGDYVAGQISDLAEKMEQAENHLSHSRFGHLVAAPQRKKEEESQLAKITRDSAKITVEQVHGLMSQVIKDILFNSVCKSGKSQTEPSDPEPMVET

SEQ ID NO: 4672 - protein, 396 aa, Solanum lycopersicum
MEREIANKGLSLDPQRNQQQHYHLNQNQNQNQDSVGKEEEENQQQSENEPQLYLHPHNQQQQPFFNQHHLIYGRLDSQQLLPPQPTPKKRSYLPSTSSLGQNVEHAAALRGKMAETSRLGIRNTVGEIVEVQGGHIVRSTGRKDRHSKVCTAKGPRDRRVRLSAHTAIQFYDVQDRLGYDRPSKAVDWLIKKAKPAIDELAELPAWKPTIGTASAAAATNTNLEQEQAQKQQEDNNFAFQQGNVSLFDNVAGPSSKRAIESNTASFLPPSLESDAIADTIKSFFPMGSSTSANSSAMQFHSFQEPHMLSRANSQNQDLSLSLQFQDPILLHHQNQQAQHHNQTNHKGTKSKCRVKHQPTLEETPHLVLTPLAGLCIRDFVLGVTVEKLALVVVVEQ

SEQ ID NO: 4673 - protein, 476 aa, Glycine max
PRVRPRVRTAARRRQKGAQEDETLRNAVAVFKGKSWKKIAEFFPDRSEVQCLHRWQKVLNPELVKGPWTQEEDDKIVELVSKYGPTKWSLIAKSLPGRIGKQCRERWHNHLNPDIKKDAWTLEEELALMNAHRIHGNKWAEIAKVLHGRTDNAIKNHWNSSLKKKLDFYLATGRLPPIPKNSPQVPVKDTIRRSASKSMLGCSNKELNAAVETSSETTAISKLDDSGRNQFESSGTVREVGDSSSVPANDSADSDCVECKPGSSNINPSCSNSEHVLIGTSSQENPTCGSLCYEPPQLDGSVPIDSLYLNYTCQQNEYCPSPTMSPTGFFTPPRAKGSELCTETPESILRKAANTFPNTPSILRRRRTGAQTLTSPTKVLKVDNNPHTSNKTERTNDDSGSGHFSGSPASHGYGIGIPNNKAFNASPPYRLRSKRTAIVKSVEKQLEFAFDKEKNDDKRSNVMTEDRLHEKKLVVT

SEQ ID NO: 4674 - protein, 405 aa, Orobanche ramosa
MAPDVSGGLRNCAQSNTTNNNNNHVLKKGPWTTSEDMILVEYVKKHGEGNWNAVQRNSGLLRCGKSCRLRWANHLRPNLKKGAFTPDEEKLIVDLHSKLGNKWARMAAQLPGRTDNEIKNYWNTRLKRRQRAGLPIYPQQLLKQQQHHHHQQNSSSHIPSNLNPLIYYDALTSPPLINPSPNQLKIYGSNSGGVALSLAGSNSSSFFNQGISNQLPYLLRYDDDFDYGTGSEMGVLGLPSIQSPAPADSSSDFVMGSDCVEDYEVEMTGGGRSKSGLLEDLLGESHALAKTDDDDNMHEKGEEDFRFGNGSSDNNYEDLRTRVSEAENSSADDDLLNLLDNFPLSVPIPNWDEVHGNESPMLSNGTCGVVESQPEAARYNTVTTFTNEDRNFGSCLWNNMPAFTS

SEQ ID NO: 4675 - protein, 195 aa, Petunia x hybrida
MTFAGTTQKCSACDKTVYLVDRLAADNRVYHKACFRCYHCKSTLKLSNFNSFEGVIYCRHHFDQLFKRTGSLDKSFEGTPKFTKPEKPVDNENGSGNKVSSLFGGTRDKCVGCSKTVYPIEKVSVNGAAYHKACFKCTHGGCTISPSNYIAHEGRLYCKHHHIQLFKEKGNYSQLESENEPESALPTPLQIAAES

SEQ ID NO: 4676 - protein, 336 aa, Arabidopsis thaliana
MVRNKEGIFAPKEKKVVVLWDLDNKPPRGPPYEAATALRKVAEKLGRVVEISAYANRHAFIHLPHWVVEERRERRNLDFMERKGEVTPIDPYICGVCGRKCKTNLDLKKHFKQLHERERQKKVNRMRSLKGKKRQKFKERYVSGNEKYNEAARSLLTPKVGYGLEAELRRAGVYVKTVEDKPQAADWAVKRQIQHSMTRGIDWLVLVSDDKDFSDMLRKAREADLGTLVVSDMDRALGRHADLWVPWSGVEKGEIGEKDLIPGKRPRFEEDEVGFGGNDELFSLSYDEDEKAEMTVESDGFGRFNVSAFSEDEWVEDEGDFVLSDSSDDDSDDELF

SEQ ID NO: 4677 - protein, 222 aa, Brasenia schreberi
MGRGKIEIKRIENTTNRQVTFSKRRAGIIKKAKELTVLCDANVSLILFSSTNKFFEYCSPTTNMKAMIDRYQQATGTSLWDAHYESMQNELATLKEKSEKVRKSIRQRYGNELDGLSYTELCGLEQNLNDALQKIRSTLEIKIKRKIDTCKKKLRSAHKNKIAVFGDVQGELARTYEESEEDYESMVVMSNAGGAQLFPIRVPATHSNVHQRGYGCHDLRLA

SEQ ID NO: 4678 - protein, 313 aa, Oryza sativa (japonica cultivar-group)
MVEARLPPGFRFHPRDDELVVDYLSGKLRSGDGGAASGGGAAGAGCPTPTLIDVDLNKCEPWDLPEIACIGGKEWYFYNLKDRKYARGQRTNRATESGYWKATGKDREITRKGSLVGMRKTLVFYRGRAPKGERTDWVMHEFRQELDHANHHHHLKEGWVLCRVFYKSRTEAVAAPTMESTLPPRYINGGTSRSPLPPLVDSSISFNHGGYEEVLPCFSSSHHQQPSPASMNASAAADDDQDYHHLSEGQRHYSDKKMMRDVQNDQVTTRFDGHLAVKREMSLKKDLSEDEQVEDYYCLTDNGSSETWNFFQQ

SEQ ID NO: 4679 - protein, 101 aa, Oryza sativa (japonica cultivar-group)
MSSSWTTKQNKVFERALAIYDRDTPDRWQNVARAVGGGKSVDDVKRHYEKLIKDVDRIDSTGGHQGSHYNSSNASSSSSSSSSNSRGSANEDQRRRYHNFQ

SEQ ID NO: 4680 - protein, 221 aa, Nuphar japonica
MGRGKIEIKRIENTTNRQVTFSKRRAGIIKKAKELTILCDAHVSLVLFSSTHKFFEYCSPTTTMKKMIDRYQQVTGTNLWDSHYESMQKEFNKLKEKNERLRKSIRQRVGDELDELNHAELCGLEQNLSEALKKIRLALDSKIKRQIDTYKKKIRSAESNRNKVFRDAQEEFNCTFEESEEDYESMLVMRNGNPQLFPIRVQPTHPDLHERGFGCHDLRLG

SEQ ID NO: 4681 - protein, 220 aa, Nuphar japonica
MGRGKIEIKRIENTTNRQVTFSKRRAGIIKKAKELTVLCDAHVSLILFSSTHKFFEYCSPTTNTKKMIDRYQQVTGTNLWDTHYESMQKEFNKLKEKNERLRKSMRQRVGDDLDELNHSELCGLEQNLSEALKKIRLALDSKIKRQIDTYKKKIRSAESNRSKVFRDAQELNCTFEESEEDYESMLVMRNGNPQLFPIRVQPTHPNLHERGFGYHDLRLG

SEQ ID NO: 4682 - protein, 184 aa, Glycine max
  misc_feature (111)..(111): Xaa can be any naturally occurring amino acid
TRPRSKLTCPLCRSTVAASESDLAMVFRSSSVAGSDSFRLEIGNISSRREGDITAVAGETRGRSYSVGAFEYLIDEEAEVEVEVAFGLADRRIVSGEKNDGAPVVAPADSXAGEVGRGGGSRNGNGWLKDYVDRLSNTVSFRSSGSFFTGSSRRSDVVLGGDYDVEASRFGDEIGEMFRWLSGV

SEQ ID NO: 4683 - protein, 187 aa, Brassica napus
MTRPARFLETAATPPQPSEQMLAAESDMVVILSALLCALICVAGLAAVVRCAWLRRFTTGENSPSANKGLKKKALQSLPRSTFTAAESTSGTAAEDGGDSTECAICLSDFADGEEIRVLPLCGHSFHVECIDKWLVSRSSCPSCRRILRPVRCDRCGHASTAGSQMKDHQHHQHSSQLTSSIPTFLP

SEQ ID NO: 4684 - protein, 345 aa, Triticum aestivum
  misc_feature (76)..(76): Xaa can be any naturally occurring amino acid
  misc_feature (243)..(243): Xaa can be any naturally occurring amino acid
MEPGRLIFNTSGSGNGQMLFMDCGAGGIAGAAGMFHRGVRPVLGGMEEGRGVKRPFFTSPDDMLEEEYYDEQLPEXKKRRLTPEQVHLLERSFEEENKLEPERKTELARKLGLQPRQVAVWFQNRRARWKTKTLERDFDRLKASFDALRADHDALLQDNHRLRSQVVTLTEKMQDKEAPEGSFGAAVDASEPEQAAAEAEAKTSLADAEEQAAAAEAFEVVQQQQQLHVKDEERLSPGERREXRCWTRGTRLLGSGCGLAGVVDSSVDSYCFPGGAGGDEYHECVMGPVAGGIQSEDDDGAGSDEGCSYYPDDAAVFFAAAQGHSHHHTDDDDQDDGQISYWMWN

SEQ ID NO: 4685 - protein, 249 aa, Diospyros kaki
MGRGRVELKRIENKINRQVTFAKRRNGLLKKAYELSVLCDAEVALIIFSNRGKLYEFSSINNMPKTLERYQKCSYGTLEDNRSAKEMEQNSYREYLKLKAKYEELQHFQRHLLGEDLGPLNLKDLEHLEHQLETSLKQIRSTKTQSMLDQLCDLQNKEKMWIEANKALERKLDEIYRENQLQSSWGGGGGEQGNSSFNHHHHHPHSQAFFHPFDCNPTLQIGYPEVSNQMGTAATHEQNMNGLVPEWML

SEQ ID NO: 4686 - protein, 165 aa, Stauracanthus genistoides
SSSSYHPFPFINPENASANNNTFPHDPLSVSYNIPPTHHHAPIPETIANFADCAAAAAMFKNDVNASNFGFSNFLTKKPAPKKDRHSKIHTSQGLRDRRVRLSIEISRKFFDLQDMLGFDKASNTLEWLFNKSKKAMKELAQSKNSSSSVANSFSSSDSECEMVQ

SEQ ID NO: 4687 - protein, 266 aa, Zea luxurians
PSADPSTDSAREPKRMRTGGGSTSSSSSSSSSMDGGRTRSSVVEAAPPAKQASAAANGPAVPVVVVDTQEAGIRLVHALLACAEAVQQENFSAAEALVKQIPMLASSQGGAMRKVAAYFGEALARRVYRFRPPPDSSLLDAAFADLLHAHFYESCPYLKFAHFTANQAILEAFAGCRRVHVVDFGIKQGMQWPALLQALALRPGGPPSFRLTGVGPPQPDETDALQQVGWKLAQFAHTIRVDFQYRGLVAATLADLEPFMLQPEGD

SEQ ID NO: 4688 - protein, 249 aa, Brassica napus
  misc_feature (231)..(231): Xaa can be any naturally occurring amino acid
MEEGGSSHDAESNKKLVRGKIEIKRIENTTSRQVTFCKRRNGLLKKAYELSVLCDAEVALVIFSTRGRLYEYANNSVKGTIERYKKACSDAVNPPSVTEANTQYYQQEASKLRRQIRDIQNSNRHIVGESLGSLNFKELKNLEGRLEKGISRVRSKKNELLMAEIEYMQKREMELQHDNMYLRAKISQGARLNPEQQDSSVIQGTAVYEPRLSSHDQSQHYNRNYIPVNLXFEPNQQFSGEDRPPLQLV

SEQ ID NO: 4689 - protein, 289 aa, Arabidopsis thaliana
MDGHQHHHLHQLQYLNKHHLHTQSQTPEIASPVAVGDRFPQWSVEETKELIGIRGELDQTFMETKRNKLLWEVISNKMRDKSFPRSPEQCKCKWKNLVTRFKGCETMEAETARQQFPFYDDMQNIFTTRMQRMLWAESEGGGGGTSGAARKREYSSDEEEENVNEELVDVSNDPKILNPKKNIAKKRKGGSNSSNSNNGVREVLEEFMRHQVRMESEWREGWEAREKERAEKEEEWRRKMEELEKERLAMERMWRDREEQRRSREEMRAEKRDSLINALLAKLTRDGSL

SEQ ID NO: 4690 - protein, 247 aa, Oryza sativa (indica cultivar-group)
MSGTPADGGGGGSGDDWFLDCGILEDLPAAACGAFPWDASPSCSNPSVEVSSYVNTTSYVLKEPGSNKRVRSGSCGRPTSKASREKIRRDKMNDRFLELGTTLEPGKPVKSDKAAILSDATRMVIQLRAEAKQLKDTNESLEDKIKELKAEKDELRDEKQKLKVEKETLEQQVKILTATPAYMPHPTLMPAPYPQAPLAPFHHAQGQAAGQKLMMPFVGYPGYPMWQFMPPSEVDTSKDSEACPPVA

SEQ ID NO: 4691 - protein, 250 aa, Arabidopsis thaliana
MSINNNNNNNNNNNDGLMISSNGALIEQQPSVVVKKPPAKDRHSKVDGRGRRIRMPIICAARVFQLTRELGHKSDGQTIEWLLRQAEPSIIAATGTGTTPASFSTASVSIRGATNSTSLDHKPTSLLGGTSPFILGKRVRADEDSNNSHNHSSVGKDETFTTTPAGFWAVPARPDFGQVWSFAGAPQEMFLQQQHHHQQPLFVHQQQQQQAAMGEASAARVGNYLPGHLNLLASLSGGSPGSDRREEDPR

SEQ ID NO: 4692 - protein, 248 aa, Glycine max
MAFEEHYVSQELKTIPSPSPSPMTVTENLDGCFDCNICLDFAHEPVVTLCGHLYCWPCIYKWLHVQSASLAPDEHPQCPVCKDDICHTTMVPLYGRGQGIAHSDHDGKASSYRGSCIPPRPPALGAQSLIATSSQSAQQLPYRNTYQNQHFNPPLYQEEDASSSQMLNPGATILAPGFPHLVFGMFGEMFYTRVFGNSENLYTHPNSYHLGESNNSPRLRRQEMQANKSLNRISIFLFCCFLLCLIVF

SEQ ID NO: 4693 - protein, 216 aa, Oryza sativa (japonica cultivar-group)
MDRKDKARKNFSSSSSSSAASMAALAAAAAAGDGGAALPSPMEEDKKPRLVASSLAPVAGGGGGGSSSSAAVAAGASSSSSSSSVAAAARRGAGRAGGGAPSGGGGGPRCQVERCGVDLSEAGRYNRRHKVCQTHSKEPVVLVAGLRQRFCQQCSRFHELTEFDDAKRSCRRRLAGHNERRRKSAADTAHGENCRHADQDAGRSHQGTGNPPFQIR

SEQ ID NO: 4694 - protein, 193 aa, Griffithsia japonica
LGMVVRKVKGPWRPEEDAILTQLVAKLGPRRWTVIASHIPGRTGKQARERWLNQLSPDLAKRPWTPEEDRVVMQAHARLGNRWSEIAKLLKGRTDNATKNRFNTTIRRQISELAAGNARADSVGGASSVVDSGAPTEMGVASAGEGGGGLVEASVMGLSCDGDDRRNAKRKRDGSHSSHEPMSQRTKTLTAST

SEQ ID NO: 4695 - protein, 306 aa, Triticum aestivum
MMAGAAHPMHFCMDSDWLKGIVPEDQGGMGSSSPSGELIIACPEPMQAQQAADRRLRPQHDQPLKCPRCDSTHTKFCYYNNYSLSQPRYFCKTCRRYWTKGGSLRNVPVGGGCRKNKRASAAKKPSAAAAIAPPISMMQQLHHGRHMAETGLHLSFSGMQPPAVSAADPLCSLGLFDWKYDHILSGSGGFESANSEAHFTGPGMMGIANGSGGGGAEYHALNALRYAAGLGEHLALPFGGATSRAERDSVVAEMKPQAERLLSLEWCGEASRAPTETSISSLGGLGLWSAMITGAAHHHHGSSAAI

SEQ ID NO: 4696 - protein, 191 aa, Brassica napus
MENVGVCDEFVNLKATELRLGLPGTEDGGEEERQKVSCCKSNKRAFPETEKDIESTGTSEFLLHSKAQIVGWPPVRSYRKNNIQTKKNESEGQGMYVKVSMDGAPYLRKIDLTVYKQYPELMKSLENMFKFSVGKYCEREGYKDSEFVPTYEDKDGDWMLVGDVPWEMFVSSCKRLRIMKGSEAKGLGCGV

SEQ ID NO: 4697 - protein, 166 aa, Glycine max
FGSRSDFHFRFGSDKLRHHCRRQWRRSLRLRPRPLLPDQSLSSIPPNQRMTEDQSVVGRRRIYYDQNGGEALICSDSEEETMDDEEEKREFIESEDYILRMTVKEFGLTDIVLESLAQCFSRNISEIKAKYETLSIHDNAGGCSQAGDSEENSQSGNFFLGKGLEA

SEQ ID NO: 4698 - protein, 280 aa, Triticum aestivum
  misc_feature (203)..(203): Xaa can be any naturally occurring amino acid
MAQEEVHDAGLALGLSLGGGGRGGGDGSSSAHRGNNSSSRLTLWEAAPSLEPSLTLSMPEDTTMTSIASGGVSSMSVGGAVKRERAEEAELGEMVSSTAVGAEEDDDGSTRKKLRLTKEQSALLEDRFKEHSTLNPKQKVALAKQLNLRPRQVEVWFQNRRARTKLKQTEVDCEFLKRCCETLTEENRRLQRELQELRAIKFXRRRRRPTTPANTPGRRPPPRPPPAPFYMQLPAATLTICPSCERLGGTAAAAAGKVDPDRPKAATHHFFNPFTHSAAC

SEQ ID NO: 4699 - protein, 257 aa, Medicago sativa
MEGMAQHPVPRTVEEVFSDYKGRRAGLIKALTTDVEKFYQLVDPEKENLCLYGFPNETWEVNLPVEEVPPELPEPALGINFARDGMQEKDWLSLVAVHSDSWLLAVAFYFGARFGFGKNDRKRLFQMINDLPTVFELATGTAKQSKDQLTAHNNGSNSKYKSSGKSRQSESQTKGVKMSAPVKEEVDSGEEEEEDDDEQGATCGACGDNYGTDEFWICCDMCEKWFHGKCVKITPAKAEHIKQYKCPGCSIKKPRIG

SEQ ID NO: 4700 - protein, 131 aa, Zea mays
MRRRGVAAADADGDVELRFRGVRKRPWGRYAAEIRDPAKKARVWLGTFDSAEDAARAYDAAARMLRGPKARTNFPLPAAAALHHPHMPAAAAAAAPPYTTYPTATGVVSTPPVARPACSSLSSTVESFSGA

SEQ ID NO: 4701 - protein, 375 aa, Zea mays
MRIQCNACGAAEARVLCCADEAALCVACDEEVHAANKLAGKHQRVHLLTDSATAAASPAPAVPKCDICQEASGYFFCLEDRALLCRDCDVAIHTVNSFVSVHQRFLLTGVQVGLDPADPVPPIAEKHVNASGGSVKQSVRHLPRRSPGVQFSVEGSASVPSKNVSNGDYSRQNSVPTARAEVVDWTKNNTTIQSVESPPKYMSEESPTLLQSSQTTTVFSNQINGNSDGTYHLSFSSGNVTDSLPDWPVDEFFSNSEYVPNLGFSEHGSSKGDNAKLESAGGSLQCRLAEGSIAEELLGQVPGLITDDYMSRVPENSWTVPEVPSPPTASGLNWHGNLCFPAYDSTMFVPEITSLQNSQNQFTVPSSFKRRRREY

SEQ ID NO: 4702 - protein, 164 aa, Brassica napus
MSSRRVGVVTRSLRRQQQANIVGQIPTEHEQDQNDDDDVVESTASAFDRAKRDKSRGSQRGPLVVGSTTRASKKGTQHQSEQANVELNDSRKSNKAVVAAPVEEPKFNCPICMCPFNEEMSTKCGHIFCKSCIKEAISCQAKCPACRKDVTAEDLIRVFLPTTE

SEQ ID NO: 4703 - protein, 281 aa, Zea mays
  misc_feature (62)..(62): Xaa can be any naturally occurring amino acid
  misc_feature (208)..(208): Xaa can be any naturally occurring amino acid
MGRGKVQLKRIENKINRQVTFSKRRSGLLKKAHEISVLCDAEVALIIFSTKGKLYEYSTDSXTWNRQLPQATMLACLYSLLMTDDAESEPCMDKILERYERYSYAEKVLISAEYETQGNWCHEYRKLKAKVETIQKCQKHLMGEDLETLNLKELQQLEQQLESSLKHIRTRKSQLMVESISALQRKEKSLQEENKVLQKEKALLLHAXAEKQKDQRQQVQRDQTQQQTSSSSTSFMLREAAPTTNVSIFPVAAGGRVVEGAAAQPQARVGLPPWMLSHLSC

SEQ ID NO: 4704 - protein, 101 aa, Brassica napus
MMSSSSSSTTQVVSLREMGMYEPFPQLSGWENAFNTIGTSNQNNNNNPSSSTVPEVEADDNNKANYTSMYNNSVEAEPSSNNDQDNDQINDKMKRRLAQNR

SEQ ID NO: 4705 - protein, 244 aa, Zea mays
MEVITHPTPRTVDEVFTDFRGRRAGLIKALTTDMVKFYQTCDPEKENLCLYGLPNETWEVNLPVEEVPPELPEPALGINFARDGMQEKDWVSLVAVHSDSWLLSVAFYFGARFGFGKNERKKLFQMINELPTIFEIVTGNAKQSKDLSGNNNTSSKSKSNGLKVPKMSSPPPKEEDESEDEDEDDEQGAVCGACGDSDGTDEFWICCDACEKWFHGKCVKITPAKAEHIKHYKCPSCSNKRARP

SEQ ID NO: 4706 - protein, 444 aa, Oryza sativa (japonica cultivar-group)
MDYEFKTYKKRQRGQQQMDFELKTYHRKRQRRRGHQQTVELPDEIVREVLIWLPVKSLARFKSVCKAWLSIISESCFIREHLQCSKLKRYWNPSSFLITPHIPLKPGDSIFAAFSTDIRFYQWSLQEDTRAAATLLYRRHFPAGEFEPVLPMAHCDGLVLLPTKTKAYVFNPATRDVLALPESNRNMRQRDNLGFDASTGKYKVARSFYRSREYNPMGIAAMGFEVFTINGEESCWRETLVDPPYPVLYSKIVTHCKGCLFYYIDKKNQQNPPQALLRFSLQDETFGVTPLLTDTYPQVEDDEVTITELGGQLCATFFCNTLQQVCIYMSGDVMDPDWNCWHIINFMNCYPIASLGSGRILLRRGSLVFCTNLKSYSIEDKLDIDDIRNNLSALKITKIDPAASVVGGKLTWQTAARPRRLPLSAKITFSPLPPFGAKCNFGSP

SEQ ID NO: 4707 - protein, 328 aa, Candida glabrata CBS 138
MVEEDRRWKLPFAGAPSIVQAHQKDEQIETMLSVKVSELLRGVRGQLFINNYQKEISVVVKLIYLGLTTALSRRTLGEEYVDLIYVNKRGSQLVRGIKRVLFVLSYTSIPYLVTKLSKKVNNRSTNNEESDDGNESTYTDILSTMIDLHLMVFYITGTYYDVFKRFWGMRYALGHTLSQEEENYRDKSSKSYKILGYIILLQHISKVKPIINKVLSILPQTKETLNAGSNGVGLKEGFAPAATPGLLTDVPENFNIDHIKLSNGKELAFIPTESRNCILCLMEMTDPSCLPCGHVFCWDCITDWTKENPECPLCRQRSYPQQVLALRA

SEQ ID NO: 4708 - protein, 207 aa, Oryza sativa (indica cultivar-group)
MASNGVAAMVQILGLHLYWETTRGVKKSWWLCVKSTVERYKKANSDTSNSGTVAEVNAQHYQQESSKLRQQISSLQNANSRTIVGDSINTMSLRDLKQVENRLEKGIAKIRARKNELLYAEVEYMQKREVELQNDNMYLRSKVVENERGQQPLNMMGAASTSEYDHMVNNPYDSRNFLQVNIMQQPQHYAHQLQPTTLQLGQQPAFN

SEQ ID NO: 4709 - protein, 162 aa, Brassica napus
MERQIINKKKRVFSVEPNKIPPSEVFTRKYTRLLVPALKKLNMNKNSSQANQLTVKHEVDMALALSAQEFAWSRFLLQKLSSSNNPTTTTSSSSNGIRIQKRSGKEGGDEDGEIEEKLRELQKLLPGGEEMNVEEMLGEIGNYIKCLELQTIALKSIVQDTT

SEQ ID NO: 4710 - protein, 431 aa, Daucus carota
MFGSEQEESSPQNIINMHFDHQHHQTTITSPSVHMRQLLISCAEHISRCDFYGAHRLINILSANSSPCGDSTERLVHQFSKALSLRLHSFAATSTITSGSTSNLVIPSLLTPKISPALPSSAGSGSGSQQVFDDESVVQSAYLSLNQITPFIRFTHLTANQAILESVEGHHAIHILDFNIMHGVQWPPLMQAMAEKFPPPMLRITGTGDNLTILRRTGDRLAKFAHTLGLRFQFHPVLLLENEESSITSFFASFAAYLQPDQTLAVNCVLYLHRLSLERLSLCLHQIKALNPRVLTLSEREANHNLPIFLQRFVEALDHYTALFDSLEATLPPNSRQRIEVEQIWFGREIADIIASEGETRRERHERFRAWELMLRGSGFHNLALSPFALSQAKLLLRLYYPSEGYKLHILNDSFFWGWQNQHLFSVSSWH

SEQ ID NO: 4711 - protein, 245 aa, Lilium longiflorum
MGRGKIEIKRIENTTNRQVTFCKRRNGLLKKAYELSVLCDAEVALIVFSTRGRLYEYANNSVKGTIERYKKASSDAFNTGSVSEANAQYYQQESSKLRNQIVSLQNAHRSMLGESIGSMGTQGTEIHGEKAGKMDNNKIRTKKNELLFAEIEYMQKREAELQNNSMFLRTKIAENERSQQQQMDMERSQQQHMDMDRSHQRHLEMLPTTSAFETMPTFDSRNFFDINLIEAHHHYQQQQTALQLG

SEQ ID NO: 4712 - protein, 221 aa, Glycine max
GTFIELKLAKTVRPAYGKTIPVQKVSLKGKDLLQFQTNSPVSVFESSSSSPSVENSNFELPVIPTKRPRTKRRRLSNISLLYSIPFILTSPAFQKFQRMDFSKSDIQTQPSGELLCKFKKKQRKKDIPLPTNKIEMKRSSSQESVAPRKCLHCEVTKTPQWREGPMGPKTLCNACGVRYRSGRLFAEYRPASSPTFVASLHSNSHKKVLEIRNRATQVTVR

SEQ ID NO: 4713 - protein, 547 aa, Arabidopsis thaliana
MKRGYGETWDPPPKPLPASRSGEGPSMADKKKADDDNNNSNMDDELLAVLGYKVRSSEMAEVAQKLEQLEMVLSNDDVGSTVLNDSVHYNPSDLSNWVESMLSELNNPASSDLDTTRSCVDRSEYDLRAIPGLSAFPKEEEVFDEEASSKRIRLGSWCESSDESTRSVVLVDSQETGVRLVHALVACAEAIHQENLNLADALVKRVGTLTGSQAGAMGKVATYFAQALARRIYRDYTAETDVCAAVNPSFEEVLEMHFYESCPYLKFAHFTANQAILEAVTTARRVHVIDLGLNQGMQWPALMQALALRPGGPPSFRLTGIGPPQTENSDSLQQLGWKLAQFAQNMGVEFEFKGLAAESLSDLEPEMFETRPESETLVVNSVFELHRLLARSGSIEKLLNTVKAIKPSIVTVVEQEANHNGIVFLDRFNEALHYYSSLFDSLEDSYSLPSQDRVMSEVYLGRQILNVVAAEGSDRVERHETAAQWRIRMKSAGFDPIHLGSSAFKQASMLLSLYATGDGYRVEENDGCLMIGWQTRPLITTSAWKLA

SEQ ID NO: 4714 - protein, 299 aa, Coprinopsis cinerea okayama7#130
MPALSEYERQRQENIKRNQELLKSLGLDGPISALLEPKAQKTKPAPKKSKKRKTEAQELGDTRNGDDTEEPASKAQRSEQANDVSEAPIPGPRRSARNAGKKIDYTKELKTARNMPLTTINDYDKQGSDEIPKKGTLDPSRFKIFGHIPGIEVGTWWAQRAQCSADGVHAPYVQGISGGKNGAYSVALSGGYDDDVDMGYAFTYTGSGGRDLKGTPSNRKNLRTAPQSSDQTFENLANKALLAWMERGLSGFLVCKYAFKRLPGQPPLPVREETEEAAIVEQGGEGSVNEYEETTSVTT

SEQ ID NO: 4715 - protein, 424 aa, Oryza sativa (japonica cultivar-group)
MALGHHGAARQPPTTMAAAASSSTTSAAAAPATATTTVAFSFQHPTPTPSCEEGDHRGRPQMGNKGEAAAAMGAMGINDAGNNTAAAAAAQHHLGVGAVRMKKVGGGGGGGGKARRKVREPRFCFKTMSDVDVLDDGYKWRKYGQKVVKNTQHPRSYYRCTQDNCRVKKRVERLAEDPRMVITTYEGRHVHSPSRDDDDAARASAEMTFICPLNRRNVPYGALLNSYGMPHFMIIVQIAFSTIYVVLVLLVAVTHVDSSLQGVYFGGNSSSAAAAAASQMSNQILIEFNQIYYFRFEFLKNHLNSSLMLTNFELARNQKTSSQISMGFPRNCISWLDTLLQPSPSTHASHLPPRGQLVASVDACGPSDADRIFPLRSTARETRSRGNINSSDLMDLSAIAIAHCISTKQPNHKVGASRERKKER

SEQ ID NO: 4716 - protein, 266 aa, Zea mays subsp. parviglumis
PSADPSTDSAREPKRMRTGGGSTSSSSSSSSSMDGGRTRSSVVEATPPATQASAAANGTAVPVVVVDTQEAGIRLVHALLACAEAVQQENFSAAEALVKQIPMLASSQGGAMRKVAAYFGEALARRVYRFRPPPDSSLLDAAFADLLHAHFYESCPYLKFAHFTANQAILEAFAGCRRVHVVDFGIKQGMQWPALLQALALRPGGPPSFRLTGVGPPQPDETDALQQVGWKLAQFAHTIRVDFQYRGLVAATLADLEPFMLQPEGD

SEQ ID NO: 4717 - protein, 258 aa, Glycine max
MESCQQKVMEKLLHGHGCANQLKLIMDHHAESDSSVEREDLAKSVLHCFSDALSILIDTNDHNKDDDKSNNSSPQDSSHVLESSRKPFHKRGRKTSMAESSDYRRHESPNPIYHDGFLWRKYGQKQIKESDHQRSYYKCAYTNDQKCEAKKQVQMIQNNPPLYSTTYFGRHTCQLHQAFETFPIDTSDPQDSRMIRFDNPDSSTHQHQNQIIHLKAEQMMPSEKAEEWSSPSEYMSSEVAYAVEAFGFNPARTSSDLS

SEQ ID NO: 4718 - protein, 282 aa, Perilla frutescens var. crispa
GSWRSLPKLAGLLRCGKSCRLPWTNYLRPDIKRGPFSTEEEKLVIQLHGILGNRWAAIASQLPGRTDNEIKNLWNTHLKKRLLLMGIDPHTHEPSLTSNGLLTRPPSSPSTRHMAQWESPRLDAEARLSKESLLSIHAPLPKSEADHFLRLSNSEVGETFRKIKNGEKAEPPSPSQSPGSSASTKCCSFSGTTTEIGLQSGLHETDCKSSKTCTEYVRTGTDSSSSNEMEDSSESTLQLLLDFPCKNDMSFLGNADCYSLYPGFTNGSLYDSSSQEKKGGFV

SEQ ID NO: 4719 - protein, 372 aa, Arabidopsis thaliana
MFVSDNNNPSRDINMMIGDVTSNGDLQPHQIILGESSGGEDHEIIKAPKKRAETWAQDETRTLISLRREMDNLFNTSKSNKHLWEQISKKMREKGFDRSPSMCTDKWRNILKEFKKAKQHEDKATSGGSTKMSYYNEIEDIFRERKKKVAFYKSPATTTPSSAKVDSFMQFTDKGFEDTGISFTSVEANGRPTLNLETELDHDGLPLPIAADPITANGVPPWNWRDTPGNGVDGQPFAGRIITVKFGDYTRRVGIDGTAEAIKEAIRSAFRLRTRRAFWLEDEEQVIRSLDRDMPLGNYILRIDEGIAVRVCHYDESDPLPVHQEEKIFYTEEDYRDFLARRGWTCLREFDAFQNIDNMDELQSGRLYRGMR

SEQ ID NO: 4720 - protein, 311 aa, Oryza sativa (japonica cultivar-group)
MEMMVHGRRDEQYGGLRLGLGLGLSLGVAGGAADDEQPPPRRGAAPPPQQQLCGWNGGGLFSSSSSDHRGRSAMMACHDVIEMPFLRGIDVNRAPAAETTTTTARGPSCSEEDEEPGASSPNSTLSSLSGKRGAPSAATAAAAAASDDEDSGGGSRKKLRLSKDQAAVLEDTFKEHNTLNPKQKAALARQLNLKPRQVEVWFQNRRARTKLKQTEVDCELLKRCCETLTDENRRLHRELQELRALKLATAAAAPHHLYGARVPPPTTLTMCPSCERVASAATTTRNNSGAAPARPVPTRPWPPAAAQRSSA

SEQ ID NO: 4721 - protein, 310 aa, Zea mays
MDSDVEMNAASDEEVMDDEDYYDYCYSDVGDDGDGGSEEELVPVDYDEGLEAEGTDEVVSRREQTFVVLNEEVISERQEEDVSKVSAVLLITREEACALLHHYKWNISKLSDEWFADEEKVRHTVGLLLNGNHEPGSRKLTCGICFEGYSSDTMSSAGCAHFYCHECWEGYISAAIGGGPGCLSLRCPDPSCSAMVLQGMVNELAKDEDKAKYARFLLRAYVEGSKKTKWCPAPDCTCAVEFLGDENYDVSCNCKFSFCWNCTEEAHRPVNCETVSKWILKNSAESENMNWFVAGSGLAFDMWSSSFCFC

SEQ ID NO: 4722 - protein, 254 aa, Sinapis alba
MGRGRVELKRIENKINRQVTFAKRRNGLLKKAYELSVLCDAEVALIIFSNRGKLYEFCSSSSMIRTLERYQKCNYGPPEPNVPSREALAVELSSQQEYLKLKERYDALQRTQRNLLGEDLGPLSTKELELLERQLDSSLKQIRALRTQFMLDQLNDLQSKERMLNETNKTLRLRLADGYQMPLQLNPNQEDHHVDYGRHDQQQQQNSHHAFFQPLECEPILQMGYQGQQDHGMEAGPSENNYMLGWLPYDTNSI

SEQ ID NO: 4723 - protein, 250 aa, Solanum commersonii
  misc_feature (231)..(231): Xaa can be any naturally occurring amino acid
MGRGRVQLKRIENKINRQVTFSKRRSGLLKKAHEISVLCDAEVGLIVFSTKGKLFEYATDSCMERLLERYERYSFAEKQLVPTDHTSPGSWTLENAKLKARLEVLQRNEKLYVGEDLESLNMKELQNLEHQLASALKHIRSRKNQLMHESISVLQKQDRALQEQNNQLSKKVKEREKEVEQQNQWDQQNHEINSSTFVLPQQLDSPHLGEASQNTNVVDNGEVEGGNSSQXQGAANNTVMPQWMVRHLNG

SEQ ID NO: 4724 - protein, 296 aa, Zea mays
MMEAGGAGAGGRDERVPQWGVQETRELIVARREMEREAVAARRSAKTMWEAVAARLRERGYRRTAEQCKCKWKNLVNRYKAFIPQFILALCHTCWNVMLSIAHFEGKETSDPENGRQCPFFDELHAVFTDRARDMQRQLLESESGASVKRKLKQPGGDRSSGLSDDEGNGGEESDEEKPLPSRKRKADDKKQQHQRMSGKSRAGFSSIHELLQDFLVQQQHIDVWWREMMERRAQERIVFEQQWRQTMQKLEQERLLLEHSWMEREEQRRMREETRAEKRDALLTALLNKLLQEDL

SEQ ID NO: 4725 - protein, 263 aa, Zea mays subsp. parviglumis
PSADPSTDSAREPKRMRTGGGSTSSSSSSSSSMDGGRTRSSVVEAAPPATQAANGPAVPVVVVDTQEAGIRLVHALLACAEAVQQENFSAADALVKQIPVLASSQGGAMRKVAAYFGEALARRVYRLRPAPDGSLLDAAFADLLHAHFYESCPYLKFAHFTANQAILEAFAGCRRVHVVDFGIKQGMQWPALLQALALRPGGPPSFRLTGVGPPQPDETDALQQVGWKLAQFAHTIRVDFQYRGLVAATLADLEPFMLRPEGG

SEQ ID NO: 4726 - protein, 247 aa, Oryza sativa (japonica cultivar-group)
MAVEAVLEASRSSSEEEAEVIVTHGGGGGGGGGGGQVEGWGKRKRSRRRRPQLPPSEEEYLALCLLMLARGRRDGDDVAASASAAAAAVEHRCSVCGKAFASYQALGGHKASHRKPPPPAMVDDDEVVVETKPAAIATPSSSASGVSGGGGGRAHECNVCGKAFPTGQALGGHKRCHYDGTIGSAAGAGASKPAAKTTVAVAASRGFDLNLPALPDVAAAADQRCAAEDDEVLSPLAFKKPRLMIPA

SEQ ID NO: 4727 - protein, 234 aa, Brassica napus
RPTRPGPVPNGVIVEHPSAVNKGTLNAVKKPPAKDRHTKVDGRGRRIRMPIICAARVFQLTRELGHKSDGQTIEWLLRQAEPSIIAATGTGTTPASFSTASLSTSSSFTLGKRGVRAGEGEAGAGGGGLTVGPTMGASLMSGGGFWAVPARPDFGQVWSFAAGAPPEMLFTQQQQAATLFVRQQQQQQASAAAAMGEASAARVGNYLPGHHLNLLASLSGGNTGSGRREEDNPR

SEQ ID NO: 4728 - protein, 342 aa, Solanum tuberosum
MTRRCSHCSTNGHNSRTCPNRGVKLFGVRLTDGLIRKSASMGNLTHFASGSGGGSTPLNGVVHDSPGDTPDHPAVGGGSADGYASEDFVAGSSSSRERKKGVPWTEEEHRMFLLGLQKLGKGDWRGIARNYVISRTPTQVASHAQKYFIRQSNMSRRKRRSSLFDIVADESGDTPMVSRDFLADDPAQAEMQSNNLLPPTPAVDEECESMGSAASANSIDGEHALPIPESSQYQHPLVYPAYVAPFYPMPYPCWPGYTAEPAIAETHEVLKPIAVHSKSPINVDELVGMSKLSLGESIGDAAKPPSLSLKLVEGSSRQSAFHANPSSGSSGMNSSHNPIHAV

SEQ ID NO: 4729 - protein, 391 aa, Coprinopsis cinerea okayama7#130
MLCRERRSWTAKEDQLLREAVNKEDPNNPNPSKWHAIAKHVPNRTNKDCRKRWFAKMASDVVKGGWSPEEDERLVKGIERYGTRWSLVASVVQTRNSDQCAKRWTDTLNPAIDRTTWTSEADEILLRAVEEHGKVWTKIVKTYFPGRTGLSAKNRYNSITRFNHDNGRGARSRRKSESVDGGYFSTSKTESVSSSSSASPTTPSLGLPMGSPPMSFSLTGAHLPPYDSLSGWQSPSSIVSDDLSPIQGYGRNVPSSGSSNASSDSSYQSVDLSMPALTPTEMGQSLAVYGNGTLLQGGDYFKASSTSSPRIVEHNNFLSSQAASDPIPSTYSQYPAIYNGNSSDLNNHFSSLDTMPNHIDSLGNISWDSSLSSAALEVKLKRSPSEFTYMY

SEQ ID NO: 4730 - protein, 392 aa, Zea mays
  misc_feature (63)..(63): Xaa can be any naturally occurring amino acid
  misc_feature (90)..(90): Xaa can be any naturally occurring amino acid
  misc_feature (103)..(103): Xaa can be any naturally occurring amino acid
  misc_feature (207)..(207): Xaa can be any naturally occurring amino acid
  misc_feature (281)..(281): Xaa can be any naturally occurring amino acid
  misc_feature (324)..(324): Xaa can be any naturally occurring amino acid
  misc_feature (368)..(368): Xaa can be any naturally occurring amino acid
LRKGLWSPEEDEKLMNHIVKHSHGCWSTVPKLAGLQRCGKSCRLRWINYLRPDLKRGAFSQEXDLIIEIHAVLGNRWSQIATRLPGRIDXNESKNLWNSSLNXKKKLRQKGIDPNTRKPLAEVVERSKSAPTVSTERTSGSSDVDASSDGALGNSSHLLSETAQSPQLLPVLGKRCQETTGLTHLFLPAKELFLDQLVSGHENLTSXLPQCRSTGSIPDFSFQQLMCYNNEFGNKNCGSNNLLWINQNESSGSTFSATAMPPVSVSPSTLSTSSGLNRSPXFELQSTSSILDGTVFPWTELTTPDKNSHVHLEEELKWPDLLHXTFTHTPKTMQNLSQSLYEDVIKADSQFNTEGLCAAWSQNLQPQXQHLQVVSDFYDKDLQRMSVRTLTR

SEQ ID NO: 4731 - protein, 496 aa, Oryza sativa (japonica cultivar-group)
MKVDVPQEEEDNEMKVDAPQEKKDNEVTADVPEEKGNDEMRVDASESIESIEPVSRSTLDNKKEDQGQMNNVEEKAASDSKDENEKTANDESGQDKVLKKPDKILPCPRCNSMDTKFCYYNNYNVNQPRHFCKNCQRYWTAGGTMRNVPVGAGRRKSKSSSLHYRHLLMAPDCMMGSRVEISKSMNPEAFASAHSTPIQPIGRNETVLKFGPEVPLCESMASVLNIQEQNGTNAAAVPTGENQEDNSCISSITSHNVLPENAAQVDKNSTPVYCNGVGPVPQYYLGAPYMYPWNIGWNNVPMMVPGTSMPESASQSESCSTSSAPWMNMNSPMMPVASRLSAPPFPYPLVPPALWGCLSSWPATAWNIPWIRTNGGCMSPSSSSNSSCSGNGSPLGKHSRDSSLPLKEDKEEKSLWVPKTLRIDDPDEAAKSSILASSSRSSPKVRAKAKQHQRLVLLVLLRQTQLHCRGRSRSRRLLDSLPVEFPIVFVSTVCVL

SEQ ID NO: 4732 - protein, 405 aa, Triticum turgidum subsp. dicoccoides
MGSSDSSSGSAQKATRYHHQHQPPPPQRGSAPELPPGFRFHPTDEELVVHYLKKKADKAPLPVNIIAEVDLYKFDPWELPEKATIGEQEWYFFSPRDRKYPNGARPNRAATSGYWKATGTDKPILASGTGCGLVREKLGVKKALVFYRGKPPKGLKTNWIMHEYRLTDASGSTTATNRPPPVTGGSRAAASLRLDDWVLCRIYKKINKAAAGDQQRNTECEDSVEDAVTAYPLYATAGMTGAGAHGSNYASPSLLHHQDSHFLDGLFTADDAGLSAGATSLSHLAAAARASPAPTKQFLAPSSSTPFNWLDASPVGILPQARNFPGFNRSRNVGNMSLSSTADMAGAVDNGGGNAVNAMSTYLPVQDGTYHQQHVILGAPLVPEAAAATSGFQHPVQISGVNWNP

SEQ ID NO: 4733 - protein, 250 aa, x Aranda deborah
MGRGRVELKMIENKINRQVTFAKRRKRLLKKAYELSVLCDAEVALIIFSNRGKLYEFCSSTSMLKTLEKYQKCNFGSPESTIISRETQSSQQEYLKLKNRVEALQRSQRNLLGEDLGPLGSKELEQLERQLDSSLRQIRSTRTQFMLDQLADLQRREQMLCEANKTLKRRFEESSQANQQQVWDPSNTHAVGYGRQPAQHHGEAFYHPLECEPTLQIGYHSDITMATATASTVNNYMPPGWLGQISGSYE

SEQ ID NO: 4734 - protein, 227 aa, Solanum lycopersicum
MGRGRVQLKRIENKINRQVTFSKRRSGLLKKAHEISVLCDAEVGLIVFSTKGKLFEYANDSCMERILERYERYSFAEKQLVPTDHTSPVSWTLEHRKLKARLEVLQRNQKHYVGEDLESLSMKELQNLEHQLDSALKHIRSRKNQLMHESISVLQKKDRALQEQNNQLSKKVKEREKSAQQISGINSSSLFAHTDFYLGTYQSTNVIDNGKWKEVVLHSSKVQLIIL

SEQ ID NO: 4735 - protein, 194 aa, Mirabilis jalapa
MMKNDMNKSGGGVIAKDVNDNTKVNGANNNADLAKPPAKAQVVGWPPVRSYRKNMLAVQKSTGAPESESEKPAANGGLVKVSMDGAPYLRKVDLKLYKSYQDLSDALGKMFSSFTLGNYGSQGMIDFMNESKLMDLINGSDYVPTYEDKDGDWMLVGDVPWEMFVESCKRLRIMKGKEAAGLAPRAMEKCKNRI

SEQ ID NO: 4736 - protein, 225 aa, Vitis vinifera
MGRGKIEIKRIENTTNRQVTFCKRRNGLLKKAYELSVLCDAEVALIVFSSRGRLYEYANNSVRTTIERYKKVCSDSSNTGSVSEANAQFYQQEASKLRRQIRDIQNLNRHILGEALSSLNFKELKNLETRLEKGISRIRSKKNELLFAEIEYMQKREIELQNSNLFLRAQIAENERAQQQMNLMPGSQYESVPQQPYDSQNLLPVNLLDPNHHYSRHDQTALQLV

SEQ ID NO: 4737 - protein, 200 aa, Oryza sativa (japonica cultivar-group)
MVTNMTHDDYVSLCLMALAQAGVGGQWPAQKQQIDMAPPAPERELLRFRCSVCGKAFPSHQALGGHKASHRKPPTAALPMHVIDAPPPPSAEDTASSSTTTTTSGGGRHRCSVCHRTFATGQALGGHKRCHYWDGLSVVSVTASASGSGSSSVRNFDLNLKPVPETVAAGVRRWGEEEEVQSPLPFKKRRLSSPSLELNL

SEQ ID NO: 4738 - protein, 234 aa, Nicotiana tabacum
MSSNSSPLEIDTSFSHSNFFFLQDQSPILQWDDDLFFNDPWFDDDQSPIIPCNSEKDENHQVFEESSDNTIMSKGSSHGQELEEVTSQEEKEKEEEEKHYIGVRKRPWGKYAAEIRDSTRNGIRVWLGTFDTAEEAALAYDQAALSMRGPWSLLNFPLEKVKKSLEKIEYSCKDGLSPAAVLKATHKTRRVKHKRSSRKKKNKETHNVIVFEDLGAELLEELLMTSSQHSCRRD

SEQ ID NO: 4739 - protein, 435 aa, Kluyveromyces lactis NRRL Y-1140
MSNKFHCDICSADCTNRVRITCAVCPEYDLCVPCFAKGLYNGKHRPSHDYKVIETNSYPILCEDWGADEELLLIKGAQTLGLGNWQDIADHIGSRDKEEVYDHYLKFYLNSEHYPIPDITKDINEPQEQFLEKRKKRMERFRERPLEPPRKPMASQPSCHEVQGFMPGRLEFETEFENEAEGPVKDMVFDADDQPLDIEVKLAILDIYNSRLTTRAEKKRLLFDNCLMEYRRLQSLDKKRSKETKDLYNKIKAFARIMSPLDFEEFSKDILEELRCRTRIHQLQEWRSNGITTLEAGLKYERDKQARIMTLERFGSQVYSSSSSSNTARYRATSAHRSQADYAQNYNEGSGRKKLMTISDIQHGADFQLLSAEEQQLCITLKILPKPYIAIKEVLFRELIRTAGQLSKKQCRDLLNIEATKANRIYDFFVSQNWV

SEQ ID NO: 4740 - protein, 343 aa, Triticum aestivum
MELGLSLGEAMADAGRELVLGLGVGVGVGPGAAREGEGRRDHDVAAAARGGLALGCGSSPEPAMRLALLPMVPSLGFPWPSESRHLEASTRGFDVNQAPSSGGSAWGACAAAEEEQEDTAAAARAAVSSSPNDSGGSFPMDFSARGAGDAAPGGAGGSRGSDEDDGRSARKKLRLSKEQAAFLEESFKEHSTLNPRQNVALAKQLNLRPRQVEVWFQNRRARTKLKQTEVDCEYLKRCCETLTEENRRLQKELAELRALKTVHPFYMHLPATTLSMCPSCERVASNSAPAPAAGAPGSGAGIASPAAPEQNRPSSFAALFSSARSFPLAAPQPQPPLPAPSSS

SEQ ID NO: 4741 - protein, 248 aa, Triticum aestivum
  misc_feature (178)..(178): Xaa can be any naturally occurring amino acid
  misc_feature (186)..(186): Xaa can be any naturally occurring amino acid
  misc_feature (217)..(217): Xaa can be any naturally occurring amino acid
MMDGGGGVGDPVEEFLIGGAGDGGEDSLAAFCDGGLGIEDVRGGDSGLGHSNLGKRGRDEPSPSGPKSKACREKMRRDKLNDRFLELCSVMNSGKHTGVEECSASNPGKNAKLDKASILSDATRMLTQLRGETEKLKESNVNLRETIKDLKAEKNELRDEKLSLKAEKERLEQQLKAXSAAPTGFXPHMPYPAAFHPAVFPPFAPPYQVPANKGAPXPAAFPGMAMWHWLPPTAMDTTQDPKLWPPNA

SEQ ID NO: 4742 - protein, 589 aa, Oryza sativa
MDSEDDMLDANDSADDDFYSGGEAGLGGSDDGDADYDFADQNSDDSAELLSHRQQQNYSILSEADIQQRHASDINRVSTVLSISKSEACVLLRNYNWSVSKVHDEWFADEEHVRKVVGFPEKLIEMPNDRELTCGICFENCPRTSMSAAACGHPFCSACWRGYISTSINDGPGCLMLRCPDPSCTAAVGQDMINSLADDEDREKYGRYLRRSYIEDNRKTKWCPAPGCEYAVEFVMGSGSYDVNCNCSYGFCWNCTEEAHRPVDCATVSKWILKNSAESENMNWILANSKPCPKCKRPIEKNQGCMHITCTPPCKFEFCWLCLGPWSEHGERTGGFYACNRYEAARQEGAYDESERRREMAKNSLERYTHYYERWAANQSSRQKALGDLLSLQNDKLEKLSDIQSQPESQLKFIIEAWLQIVECRRVLKWTYAYGFYLPEHEHAKRQFFEYLQGEAESGLERLHQCAEKELQVYLEAESPSKDFNDFRTKLAGLTSVTRNYFENLVRALETGLNDVGPSTSHGTCSKSATSKSLGSKSKSSKSRASSTSSKTGGSSRGVDESNIWTCDQCTYANPRSARNCQACNNQHR

SEQ ID NO: 4743 - protein, 285 aa, Glycine max
  misc_feature (278)..(278): Xaa can be any naturally occurring amino acid
MESGRIFFGASASSGNNMLFLGNTELAFRGRSIMSMEEASKRRPFFTSPDELYDEEYYEKQSPEKKHRLSSEQVHLLEKSFEEENKLEPERKTQLAKKLGLQPRQVAVWFQNRRARWKTKQLERDYDVLKSSYDTLLSSYDSIMKENEKLKSEVVSLNEKLQVQAKEVPEEPLCDKKVDPIPVDEDMAPIFGTRVEDHLSSGSVGSAVVDEGSPQVVVDSVDSYILADNYGGCVGPVERVQSEEEDGSDDGRSYLDVFVVSETEHQNHEEGETLGWWXTNMYYVG

SEQ ID NO: 4744 - protein, 438 aa, Oryza sativa (japonica cultivar-group)
MRISEEKPCTDQELDADQMNSSSFNSSSECENQTPSNDEMTGSESKSEAAQTEGGGSSEEKVLKKPDKILPCPRCNSMDTKFCYYNNYNINQPRHFCKSCQRYWTAGGSMRNLPVGAGRRKSKSSTANYRSILITGSNLAAPAGDAPLYQLSIKGDQTATAVKFAPDSPLCNSMASVLKIGEQSKNAKPTSTAQPRNGETQTCPASGTTSDSPRNEPVNGAVSGHQNGIVGHSGVPPMHPIPCFPGPPFVYPWSPAWNGIPAMAPPVCTAPAEPANSSDNGSTASVQWSMPPVMPVPGYFPVIPSSVWPFISPWPNGAWSSPWIQPNCSVSASSPTSTSTCSDNGSPVLGKHSRDSKPQGDDKAEKNLWIPKTLRIDDPDEAAKSSIWTTLGIEPGDRSMFRSFQSKPESREQISGAARVLQANPAALSRSQSFQETT

SEQ ID NO: 4745 - protein, 245 aa, Cocos nucifera
KQVKGSEFPRSYYKCTYPNCPVKKKVERSQEGHITEIIYKGAHNHPRLSHSFRSMQLEGWEQRGLQSGLHGEQHSKVNTRNGTSAHDGRNDGLEATLSPSLAAEFCDTSTSMPVTEGCTSCEIKDAMDVSSTLSNKQEENDLANHGSMSLGCDGEGDEIEPKRRKLDAGALEICASSKVVREPRVVVQTTSEVDILDDGYRWRKYGQKVVKGNPNPRSYYKCTNPGCTVRKHVERASHDLKSVIT

SEQ ID NO: 4746 - protein, 239 aa, Brassica oleracea var. botrytis
RGRVQLKRIENKINRQVTFSKRRSGLLKKAHEISVLCDAEVALIVFSSKGKLFEYSTDSCMESILERYDRYLYSDKQLVGRDISQIENWVLEHAKLKARVEVLEKNKRNFMGEELESLSLKDLQSLEHQLDAAIKSIRSRKNQAMFESISALQKKDKALQDHNNTLLKKIKEREKKTGHQEGQLNHCSNNSSIVQPQYCLTSSRDGFVGRVGGENGGASSLTEPNSLLPAWMLRPTTNE

SEQ ID NO: 4747 - protein, 250 aa, Elaeis guineensis
MGRGRVQLRRIENKINRQVTFSKRRSGLLKKAHEISVLCDAEVALIIFSTKGKLYEYATDSCMERILERYERYTYAEKALISSGPELQGNWCHEFGKLKAKVEALQKSQRHLMGEQLEPLNLKELQQLEQQLESSLKHIRTRKCQLMFESISELQKKEKSLQEQNKMLEKELMEKQKVKALNQQAPWEQQGPPQTSSSSPTSFLIGDSLPTLNIGTYQCSGNEHGEEAAQPQVRIGNSLLPPWMLSHLNG

SEQ ID NO: 4748 - protein, 241 aa, Brassica oleracea var. botrytis
MGRGRVQLKRIENKINRQVTFSKRRSGLLKKAHEISVLCDAEVALVIFSSKGKLFEYSTDSCMERILERYDRYLYSDKQLVGREISQSENWVLEHAKLKARVEVLEKNKRNFMGEDLDSLSLKELQSLEHQLHAAIKSIRSRKNQAMFESISALQKKDKALQDHNNALLKKIKEREKNTVQQGGQLIQCSNNASILQPQYCLTSSRDGFVGRVGEENGVASLLAEPNSLLPAWMLRPTTKE

SEQ ID NO: 4749 - protein, 224 aa, Joinvillea ascendens
MGRGRIEIKRIENATNRQVTYSKRRTGIMKKAKELTVLCDAQVAIIMFSSTGKYHEFCSPSTEIKTIFDRYQQAIGTSLWIEQYENMQLTLSYLKDINRNLRTEIRQRMGEDLDALDIDELRGLEQKVDTALKEVRHRKYHIISTQTDTYKKKVKHSFEAYRNLQQELGMRDEPAFGFVDNAPGPWEGAVSLGVGGPDMYAFRVVPSQPNLHGMAYGSHDLRLG

SEQ ID NO: 4750 - protein, 235 aa, Oryza sativa (indica cultivar-group)
MAPRAATVEKVAVAPPTGLGLGVGGGVGAGGPHYRGVRKRPWGRYAAEIRDPAKKSRVWLGTYDTAEEAARAYDAAAREFRGAKAKTNFPFASQSMVGCGGSPSSNSTVDTGGGGVQTPMRAMPLPPTLDLDLFHRAAAVTAVAGTGVRFPFRGYPVARPATHPYFFYEQAAAVAAAEAGYRMMKLAPPVTVAAVAQSDSDSSSVVDLAPSPPAVTANKAAAFDLDLNRPPPVEN

SEQ ID NO: 4751 - protein, 243 aa, Brassica oleracea var. botrytis
MGRGRVQLKRIENKINRQVTFSKRRSGLLKKAHEISVLCDAEVALVVFSSKDKLFEYSTDSSMERILERYDRYLYSDKQLVGRDISQSENWVLEHAKLKARVEVLEKNKRNFMGEDLDSLSLKELQSLEHQLDAAIKSIRSRKNQAMFESISALQKKDKALQDHNNTLLKKIKEKEKEKNTGQQEGQLIQCSNNSSVLQPQYCVTSSRDGLVERVGGENGGASSLIGPNSLLPAWMLRPATNE

SEQ ID NO: 4752 - protein, 151 aa, Elaeis guineensis
MGRGRVQLKRIENKINRQVTFSKRRSGLLKKAHEISVLCDAEVALIVFSTKGKLYEYSTNASMEKILERYQCYSYAERALVEEDPKSQGRWCHDYGELRSKVEALQKSQRHLMGEQLESLTFKELQQLELHLDGALRHIRSRRVNQSFSFH

SEQ ID NO: 4753 - protein, 197 aa, Clematis integrifolia
TGIMKKAEELTVLCDAQVSLLMFSTTNKLHEYISPSITQKEFYDKYQRSSGVNLWDSQYEKMQENLKKLKETNNRLRKEIRQRHGEDLEGLQLQQLCGLEQNMLKSAERIRHKKFHVLGTQTETCKKKIKSHLEAHNNLLRGFEEGDTSCHYGFIPHGDDYDDDNGGSQVFAFRLQPTQPSLQDAQAAYGSYGLTLA

SEQ ID NO: 4754 - protein, 229 aa, Elegia elephas
MGRGKIEIKRIENPTNRQVTYSKRRTGIMKKAKELTVLCDADVSIIVFSHSGKCHEYRSPGADTKKIMDRYQQASGTNLWSEQYESMQRTLSHLNEINGDLRREIRQRMGKDLDGLDFDHLRGLEQNVDQALTEVRTRKYHKISTQTETYKKKVKNFAEAYRSQLQELGMRDESVYGYVDNGYVDNTPAQWERRVPLESGASNMNPYRVVPSQPNLHGMAYGSHELRLG

SEQ ID NO: 4755 - protein, 282 aa, Nicotiana sylvestris
MASPQENSTTLDLIRQHLLDDNVFLEHYCSETETTTLIYSQSSSSSESLDQSFSFEPTLNYATTAQSSNLEVSTFFNNSKTEFDSFEFGTIPNVSAARSSSLKQTSFKERKPSLNIAIPVKQEVVQKVELAPTEKKHYRGVRQRPWGKFAAEIRDPNRKGTRVWLGTFDTAIEAAKAYDRAAYKLRGSKAIVNFPLEVANFKQEFNNEIRPLVNSSRKRVRETVNEEQLVINKEMKIEEERVPTAPLTPSSWSAIWDSGDGKGIFEVPPLSPFGAYSQLVMI

SEQ ID NO: 4756 - protein, 225 aa, Elegia elephas
MGRGSIEIKMIENPTNRQVTYSKRRTGIMKKAKELTVLCDAEVSIIMFSNSGKCHEYCSPGTDTKKIMNRYQQSLGTNLWSEQYESMQRTLSHLKEINGNLRREIRQRMGEDLDGLDFDHLRGLEQNVDHALHEVRTRKYHVISTQTDTNKKKVKNSEEAYRRLLQELGMRDESVYGYVDNAPVPWEHGVSLESRESHMYPYRVVPSQPNLHGMALYGSHELRLG

SEQ ID NO: 4757 - protein, 227 aa, Nicotiana sylvestris
MAVKNKVSNGDLKGGNVKTNGVKEVHYRGVRKRPWGRYAAEIRDPGKKSRVWLGTFDTAEEAAKAYDTAAREFRGPKAKTNFPLPSENQSTSHSSTMESSSGETGIHAPPHAPLELDLTRRLGSVAADGGDNCRRSGEVGYPIFHQQPTVAVLPNGQPVLLFDSLWRPGVVNRPQPYHVMPMAMGFNGVNAGVDPTVSDSSSVVEENQYDGKRGIDLDLNLAPPTEF

SEQ ID NO: 4758 - protein, 237 aa, Nicotiana sylvestris
MYQPISTEFPVYHRTSSFSSLMPCLTDTWGDLPLKVDDSEDMVIYGLLSDALTTGWTPFNLTSTEIKAEPREEIEPATSPVPSVAPPAETTTAQAVVPKGRHYRGVRQRPWGKFAAEIRDPAKNGARVWLGTYETAEEAALAYDKAAYRMRGSKALLNFPHRIGLNEPEPVRLTVKRRSPEPASSSISPASENSLPKRRRKAVAAKQAELEVQSRSNVMQVGCQMEQFPVGEQLLVS

SEQ ID NO: 4759 - protein, 305 aa, Oryza sativa
  misc_feature (57)..(57): Xaa can be any naturally occurring amino acid
  misc_feature (172)..(172): Xaa can be any naturally occurring amino acid
MLIHGEGSSSSAAAAGGKIKGSWSPEEDEQLRGAVARHGPRNWTAISEEVPGRSGKXSCRLRWCNQLSPGVHRRPFTPDEDALIVAAHAKYGNKWATIARLLDGRTDNSVKNHWNSSLRRNRRAAAAAAAAAASVSYQSMDLTEEADNDDEGTSDDSVAIPAQSSPAAVVAXGVPVLPPPPPPAKRLCVAPPTGVEHRAPPPDPPTSLSLSPPGAAAAAISASTVVGGSSAARAEEEAVAREKARMEQDPWLMAMMRQMITEEVQRQVSVVYSLVASSAAMAAQTGNAGGVGRKGPDGRPSNGQD

SEQ ID NO: 4760 - protein, 209 aa, Pharus virescens
MGRGKIEIKRIENSTNRQVTFSKRRNGILKKAREISVLCDAEVGVVIFSSAGKLYDYCSPKTSLSKILEKYQTNSGKILWDEKHKSLSAEIDRIKKENDNMQIELRHLKGEDLNSLQPKDLLMIEEALDNGLTNLRDKQMDHWEMLARNSQMLEEENKLLAFKLHQHDVELSGSMRDLELGYHPDRDFAAQMPITFRVQPSHPNLQENN

SEQ ID NO: 4761 - protein, 297 aa, Oryza sativa (japonica cultivar-group)
MGAPKQKWTAEEESALKAGIAKHGAGKWRTILKDPDFSNVLRYRSNVDLKDKWRNMNVTVNASGARDRVKAPVVKKPRSAPKHEGHSTSTAIAAVTSDGDDDVAEPVPLATSTSSKRSLSRLDNIIVEAVRSLNEPTGSYKTAIANYIEEQYWPPADFDHVLSSKLNDLTASGKLIKVNRKYRIAPSSSLSEGRSSKVVLLEDIKKEPTKLDREDVAVLTKSQIDAELARMRTMTAEEAAAAAARAVAEAEAIMAEAEAAVREAEAAEADAVAAQAFAEAAMATFKNRSSAKLIIRA

SEQ ID NO: 4762 - protein, 113 aa, Brassica rapa
LVDKLTADNRVYHKACFRCHHCKGTLKLSNYNSFEGVLYCRPHFDQNFKRTGSLEKSFEGTPKIGKPDRPLEGERPAGTKVSNMFGGTREKCVGCDKTVYPIEKVSVNGTLYP

SEQ ID NO: 4763 - protein, 544 aa, Oryza sativa (japonica cultivar-group)
GRRGRLHARAGARYVVLTEDDIRERQEEMISRVSAIFSVPRESACVLLRHYKWSISKLSDDWFADEENVRRSVGLPSNVVHVPDCPELTCGICFEGCAANAMSCAGCSHFYCHECWEGYISAAVNDGPGCLVLQCPEPSCDAIVLEDMINSLTKDEDKVKYARFVLWSYIGVNNKIKWCPAPDCTCAVEFLGDGNYDVSCKCKFSFCWNCAEEAHRPVSCDTVSKWILKNSAESENMNWILAYSKPCPKCKRPIEKNQGCMHMTCTPPCKFEFCWLCLGAWSDHGDGTGGFYACNRYQSAKMGGMYDEAEARRERAKNSLERYMHYYERWASNQTSRQKAQADLQKVENEDLTKLSDVVGIPETQLKFIPEAWSQIIECRRVLKWTYAYGYYLHNKAKSDFFVYLQGEAESGLERLHKCAEKDMREFLPTADSTQPSLSLQDFGEFRVKLSGLTSVTRNYFENLVQTLEAGLQDVRATDQSASVSTSSSKKPPTNTKGKSGRSKVARTSQERSGDRWPCDRCTFINPSSTNSCNMCGRNKPRRR

SEQ ID NO: 4764 - protein, 260 aa, Triticum aestivum
MSSAGSARVPKRRRTTKTSEAADRQLQERQFLDLNLFPAVEVASTGGSLSINEPVSHRQPPPTVAALLYETTQVMVSSAAAESNIGMNSFPINVEVIDDDVVIYTSGPPPQARQQSSRTGPITVIIDDDSETTAGPAGEGLDEHVNTLLSLGMNPRHNPSRAQPNTDLVINIVDTPETNSIPPKVAQAVPEPVKEIPKETKFSCPVCMNELVNASSTICGHIFCQKCIKASIQAQKKCPTCRRKLTMSNFHRVYLPTADN

SEQ ID NO: 4765 - protein, 558 aa, Arabidopsis thaliana
MSVKPTVALRGILVGGVAIFAKVAAAMKAAGGVKLGAAATAMTVAATAAVSGETEPPNQTLDHVLSWLEDSVSLSPLPGFDDSYLLHEFDGSQTWEWDQTQDPEHGFIQSYSQDLSAAYVGCEATNLEVVTEAPSIDLDLPPEIQQPNDQSRKRSHDGFLEAQQVKKSARSKRKAIKSSEKSSKDGNKEGRWAEKLLNPCALAITASNSSRVQHYLCVLSELASSSGDANRRLAAFGLRALQHHLSSSSVSSSFWPVFTFASAEVKMFQKTLLKFYEVSPWFALPNNMANSAILQILAQDPKDKKDLHIIDIGVSHGMQWPTLLEALSCRLEGPPPRVRITVISDLTADIPFSVGPPGYNYGSQLLGFARSLKINLQISVLDKLQLIDTSPHENLIVCAQFRLHHLKHSINDERGETLKAVRSLRPKGVVLCENNGECSSSADFAAGFSKKLEYVWKFLDSTSSGFKEENSEERKLMEGEATKVLMNAGDMNEGKEKWYERMREAGFFVEAFEEDAVDGAKSLLRKYDNNWEIRMEDGDTFAGLMWKGEAVSFCSLWK

SEQ ID NO: 4766 - protein, 268 aa, Zea mays
  misc_feature (195)..(195): Xaa can be any naturally occurring amino acid
MVRGKTQMKRIENPASRQVTFSKRRNGLLKKAFELSVLCDAEVALVVFSPRGKLYEFASGSAQKTIERYRTYTKDNVSNKTAHQDIEQVKADAEGLAKKLEALEAYKRKLLGERLEECSFEELHSLEVKLEKSLHCIRGRKTQLLEEQLHKLKEKEMNLRKSNEDLREKVMGAKTFCRRCTAASGMPTTQENRLXILPLTSTSCAVISYCKKQPPPPPPMLMAPPPPPAPAAIDHTGPKDVGMDVETELYIGLPGRDYRSNNKDMTAQ

SEQ ID NO: 4767 - protein, 268 aa, Arabidopsis thaliana
MEVTSQSTLPPGFRFHPTDEELIVYYLRNQTMSKPCPVSIIPEVDIYKFDPWQLPEKTEFGENEWYFFSPRERKYPNGVRPNRAAVSGYWKATGTDKAIHSGSSNVGVKKALVFYKGRPPKGIKTDWIMHEYRLHDSRKASTKRNGSMRLDEWVLCRIYKKRGASKLLNEQEGFMDEVLMEDETKVVVNEAERRTEEEIMMMTSMKLPRTCSLAHLLEMDYMGPVSHIDNFSQFDHLHQPDSESSWFGDLQFNQDEILNHHRQAMFKF

SEQ ID NO: 4768 - protein, 329 aa, Glycine max
MDPKFIGKPLAMVDLDRDRMSERGSHHRRSHSDTSFRFPANFDELLLFDPSDLDISGLPSPLPLPSQGAGGVVPMSVVSEESGGRPRPSGASAGGHLRSLSVDSDFFDGLGSGVGGDERGAGNGGGERHSNSMEGSSTTSFEADSATMMDGMKKATAPDKLAELALTDPKRAKRMLANRQSAARSKERKIRYTSELEKKVQTLQTEATNLSAQLTMLQRDTTDLTAQNKELKLRLQAFEQEAQLREDLNEALKKELQRLRVQSACWGAMTGGNPSFGGIFNQLASQLAMQQLSNSVPHQHQTQHQPQVGMPPPPSGQKHPKFMDFNQQK

SEQ ID NO: 4769 - protein, 611 aa, Cryptococcus neoformans var. neoformans B-3501A
MPPRRQSQASQRKGKQPAQETQDDSDEETQGGRSGPLTDADIESRAGMLVRLALFQEYKRIPIRRTEVAKQILPDNTRAFPLVFARAQTILRDTFGCELYEIRARGKGDSTEDPSQTQAMTQTQKKGKGKGRQPNRGLDAIDEEEEEEDEEEEDATITQKVKRETGTKVYILQNILPGKIIEAMAEPAPLPHGIEVEGDDDDSGALLQWDKGDGGIIGHVGLLGIRTLILSLVLCHNRIINDDHLHALLRRLNLHRETVLPYASKDTTDPHLTLDKYLELLAKYQYLEKIKNPGPMGQAEGGTVEWKWGSREAEFSSKAAAKFMEEIMLGKEGESDSEEEDEDQPRRRGRGAPRERASRPQKRQKLRDDIIKAAGGVPLKPRHSAHYGQRQHPHQHLHPQQNYNHQHASMSEHGQEEYPPVPLQTGPMIAPHQDLHSFLESFWTRQMDTVEGETPDWKSYNLPLARIKKVMKSDEEVKMISAEAPIMFSKACEIFISELTCRAWLVAESHKRRTLQKSDVAAAIAYSDMFDFLIDIVPRDDGGVGGGGSGGGVGGSGTVTGAGSVVADEGMERDEDDPEGDEGEGEGEGEGEGFDGQEEEGDLYSEYVQGD

SEQ ID NO: 4770 - protein, 235 aa, Arabidopsis thaliana
MSLQTKHIDDLKEALMCQRNNDDKLEDLVGKIVNDYHTYAGKRSELSYRCCAHYFAPSWNTPIENSMLWMGGCRPSSFIRLIYALCGSQAETQLSQYLLKIDDDFDINHGGFMSDLTATQLGKLNDLHLEVIKKEDKITKTSANFQDDVADLPIADVVHADVAVEDALDKHEEGMAVLLAEADKLRFETLRKIVDVVTPLQAVEFLLAGKRLQLSLHDRGRVRADVCGGVGGAAV

SEQ ID NO: 4771 - protein, 368 aa, Arabidopsis thaliana
MATSSSSYGIEQLQKGCYYEWMSVQAKHIVDLKEALMSHRSKEDHKLEELVGKIVNDFQKYTEKRSELSRRSCSSYFAPSWNSPLENGLLWMGGCRPSSFIRVIYSLCGSQAETQLSQYLLKIDENVEVNHGGSMSDLNASQLAKINDLHIKVIEKEDKITKKSANLQENVADMPIAIAAYATDLMNGDVVVEDALDKYEEGMAVLMVEADKLRFETLRKIVDVVTPVQAAEFLLAGKRLHISLHEWGRVREEQRFGCVRTDAAAATGGAGTEKSKRSSLLMLKLHSFYTKIIKTCMVNFGNYFERLPVKLPNNRHVEKEKKKEVKEEEVENWGLRELIDGGDAAPGRILHRNNINIGSSRFVSYNSF

SEQ ID NO: 4772 - protein, 255 aa, Arabidopsis thaliana
MEKLLHGHGCANQLLIMDQTESDSSMEREDLAKSVLHCFSDALSILIDTNDHQDDQSNNSSPQDSSPVLESSRKPLHKRGRKTSMAESSDYHRHESSTPIYHDGFLWRKYGQKQIKESEYQRSYYKCAYTKDQNCEAKKQVQKIQHNPPLYSTTYFGQHICQLHQAYATFPIDTSDFEEHEGSHMIRFGHPNISFSSSTSNLRQHQNHQDRIKDEYMKPVIAEDWSPSQWMSSEVALAVEAFEFNPFWTSHDLSS

SEQ ID NO: 4773 - protein, 196 aa, Aquilegia alpina
TGIVKKARELTVLCDAEVSLIMFSSTGKLSEFISPSTTTKKIYDQYQQVSGINLWNSHYEKMQESLKKQKETNMRLRREIRQRIGESLDDDMSFDELRSLEQDLDESVKLVRDRKYHMIATQTETYRKKLRNLQETHTHLVREFETRGEDPYYEGDYESLLGMSSVGAHLVSYRVQPSQHNIQNGEGYGSHNLRLA

SEQ ID NO: 4774 - protein, 233 aa, Elaeis guineensis
MGRGRVQLKRIENEINRQVTFSKRRSGLLKKAHEISVLCDAEVAVVVFSTKGKLYEYSTDSSMEKILERYRQYSNAEKALAQGDPGPQGSWLHEFGELKSKVEALQKCQRHLMGEQLDSLALKELQQLEQRLESALRHIRSRKNQLLFDSIAELRRKEKSLQEQNCILEKRLVESSAGAQNEHPHCERQSQPRTSSSSPLPFLVTDSFPTLHVRSNQARGTSLPAWMLRHVSG

SEQ ID NO: 4775 - protein, 72 aa, Brassica napus
RTRGTLLAEADNLRVYTLSKIIEVLAPMQAADFLLAGIKLHLSMHSWGALRDRRRRECIIEAADDAGGKEGK

SEQ ID NO: 4776 - protein, 246 aa, Zea mays
  misc_feature (92)..(92): Xaa can be any naturally occurring amino acid
MGRGKVQLKRIENKINRQVTFSKRRSGLLKKAHEISVLCDAEVALIIFSTKGKLYEYSTDSCMDKILDRYERYSYAEKVLISAESETQGNWXCHEYRKLKAKVETIQKCQKHLMGEDLETWNLKELQQLEQQLESSLKHIRTRKNQLMLESISELQRKEKSLQEENKVLQKELAEKQKAQRKQVQWGQTQQQTSSSSSCFVIREAAPTTNISIFPVAAGGRLVEGAAAQPQARVGLPPWMLSHLSS

SEQ ID NO: 4777 - protein, 352 aa, Oryza sativa
MSIPKITRRPCSSSFTNNPYGTHIYIYKYSRCSVLYTDYYYYFLTPLVNSLLILHVLGAMDYEFKTYKKRQRGQQQMDFELKTYHRKRQRRRGHQQTVELPDEIVREVLIWLPVKSLARFKSVCKAWLSIISESCFIREHLQCSKLKRYWNPSSFLITPHIPLKPGDSIFAAFSTDIRFYQWSLQEDTRAAATLLYRRHFPAGEFEPVLPMAHCDGLVLLPTKTKAYVFNPATRDVLALPESNRNMRQRDNLGFDASTGKYKVARSFYRSREYNPMGIAAMGFEVFTINGEESCWRETLVDPPYPVLYSKIVTHCKGCLFYYIDKENQQNPPQALLRFSLQDGTFGVTPLLT

SEQ ID NO: 4778 - protein, 225 aa, Petunia x hybrida
MGRGKIEIKRIENNTNRQVTFCKRRNGLLKKAYELSVLCEAEIALIVFSTRGRVYEYSNNNIRAIIDRYKKATVETSNAFTTQELNAQFYQQESKKLRQQIQLIQNSNRHLVGEGLSSLNVRELKQLENRLERGIARIRSKKHEMILAESEDLQKREIQLEQENAFLRSKIAENERLQELSMMPAGGQEYNAIQQYLARNMLQLNMMEGVPSYPLPSDKKSLDLE

SEQ ID NO: 4779 - protein, 167 aa, Triticum aestivum
MAMMKMTHDDYVHLCLMALASVATGGDQAQAAKGQWLQTVTAAAPAASELRFRCSVCGKAFPSHQALGGHKASHRKRAALVLPLQSVSPAEETVASSTSSGVGGHRCSVCHRSFATGQALGGHKRCHYWDGLSVSLTASASRSGSGSSVRDFDLNLTPVPEKAVGGM

SEQ ID NO: 4780 - protein, 242 aa, Elaeis guineensis
MGRGRVELKRIENKINRQVTFAKRRNGLLKKAYELSVLCDAEVALIIFSNRGKLYEFCSSSSMMKTLERYQKCNYGAPETNIISRETQSSQQEYLKLKARAEALQRSQRNLLGEDLGPLSSKELEQLERQLDASLKQIRSTRTQYMLDQLADLQRKEQMLCEANKSLRRRLEESNQAGQQQVWDPTAHAVGYGRQPPQPQSDGFYQQIDSEPTLQIGYPPEQITIAAAPGPSVNTYMPGWLA

SEQ ID NO: 4781 - protein, 225 aa, Nicotiana tabacum
MRRGRAAAAPAPVTGEPNGSGGSKEIRFRGVRKRPWGRFAAEIRDPWKKTRVWLGTFDSAEDAARAYDAAARALRGPKAKTNFPLPYAHHHQFNQGHNPNNDPFVDSRFYPQDNPIISQRPTSSSMSSTVESFSGPRPPPAPRQQTTASSRKYTRSPPVVPDDCHSDCDSSSSVVDHGDCEKENDNDNDNIASSSFRKPLLFDLNLPPPMDDAGADDLHCTALCL

SEQ ID NO: 4782 - protein, 207 aa, Pharus virescens
MGRGKIEIKRIENTTNRQVTFSKRRNGILKKAREISVLCDAEVSVVIFSSAGKLYDFYSPRTTLPKILEKYQTNSGKILWDDKHKSLSAEIDRIKKENDNMQIELRHLKGEDLNSLPPKELIAIEEALTNGQTNLRDKQMEHWRMLRRNAKIIEDVNKLLAFRLHQPDVALNGRMRDLELGYHPEDFVPHMLNFIVQPSHPNLQEEK

SEQ ID NO: 4783 - protein, 256 aa, Brassica oleracea var. botrytis
MGRGKVELKRIENKINRQVTFAKRRNGLLKKAYELSVLCDAEIALLIFSNRGKLYEFCSNPSGMAKMVEKYRKHSYATMDPNQSAKDLQERYQDYLNLKSRVEVLQHSQRHLLGEEIAGIGVDELEQLECQVDTSLRQIRSTKARSMLDQLSDLKSKEEMLLETNRDLKRKLEESDAALNQTLWGASSSAEHSQQQQEGMTSYHANPLSQEVGFFRPLQGNVALQMSHYNPGVPNASNSATTSQNVINGFFPGWMV

SEQ ID NO: 4784 - protein, 242 aa, Elaeis guineensis
MGRGRVELKRIENKINRQVTFAKRRNGLLKKAYELSVLCDAEVALIIFSNRGKLYEFCSSSSMMKTLERYQKCNYGAPETNIISRETQSSQQEYLKLKARVEALQRSQRNLLGEDLGPLSSKELEQLERQLDASLKQIRSTRTQYMLDQLADLQRREQMLCEANKSLRRRLEESNQAGQQQVWDPTAHAVGYGRQPPQPQSDGFYQQIDGEPTLQIRYPPEQITIAAAPGSSVSTYMPGWLA

SEQ ID NO: 4785 - protein, 250 aa, Brassica oleracea var. botrytis
MGRGRVELKRIENKINRQVTFAKRRNGLLKKAYELSVLCDAEVALIIFSNRGKLYEFCSSSNMIKTLERYQKCSYGSIEVNNKPAKELENSYREYLKLKGRYEGLQRQQRNLLGEDLGPLNSKELEQIERQLDGSLKQVRSIKTQYMLDQLSDLQTKEQMLLETNRALAMKLDDMIGVRSHHMGGGGGGWEGNEHNVSYAHHQAQSQGLFQPLECNPTLQMGYDNPVCSEQITATTQAQAQPGYIPDWML

SEQ ID NO: 4786 - protein, 242 aa, Elaeis guineensis
MGRGRVELKRIENKINRQVTFAKRRNGLLKKAYELSVLCDAEVALIVFSNRGKLYEFCSSSSMLKTLERYQKCNYGAPETNIVSRETQTSQQEYLKLKARVEALQRSQRNLLGDDLGPLSSKELEQLERQLDASLKQIRSTRTQYMLDQLADLQRREQMLCEANKSLKQRLEESNQATQQQVWDPNAPAVGYGRQPPQPQGDGFYQQIECDPTLHIGYPPEQITIAAAPGPSVSNYMPGWLA

SEQ ID NO: 4787 - protein, 119 aa, Brassica napus
MIAEAETKDTMEEIQTQKKEEDEDEEEGPPPGWESTVLPPPPIAAVTTAVNSTTAAEISEMAQMVCGSCRRLLSYPRGTKHVKCSCCQTVNLVLEAYQVGQVKCSNCELLLMYPYGAPS

SEQ ID NO: 4788 - protein, 167 aa, Kluyveromyces lactis NRRL Y-1140
MGRYSVKRYKTKRRTKDLDLIYEELTSQKQIDSLLNQPIDETKPGLGQYYCIHCAKYFETAYALKTHLKTKIHKRRVKELKGVPYTQQVADAAVGCGVNSFLARVEQIKSQIGPQKEENEKILTSHLDTTLANVSTTESTLPYLDGAVQEQAQQEAVVAEGEIQMAD

SEQ ID NO: 4789 - protein, 226 aa, Oryza sativa (japonica cultivar-group)
MGLNEKPLVPPLSPKPVDFRAHQVFPSKHHDFDTSKSRNISGSVAIGSDSEEEYLATSLLMLAHGIRDETKDIRGMGDVKGVGVDTLELVKPSQRAYECSVCGKVYWCYQALGGHMTCHRNLFAQVVAGDELSSDRTMVVKGHKCSICRLEFPSGQALGGHMRVHYVGGVEGGSVKEKNVVKTKVTGALKLVLKDFDLNVPVVATMVGDEAESSHSEAKARMMTLP

SEQ ID NO: 4790 - protein, 246 aa, Petunia x hybrida
MGRGRVQMKRIENKINRQVTFSKRRSGLLKKAHEISVLCDAEVGLIVFSTKGKLFEYATDSCMERILERYERYSYAERQLVSTDHSSPGSWNLEHAKLKARIEVVQRNQRHYMGEDLDSLSMKDLQNLEQQLDSSLKHIRSRKNQLMHESISELQKKDKSLQEQNNLLSKKVKEREKELAQQTQWEQQNNHHEINSSSSFVLPQPLDSPHLGEAYQSTVDNGEVEGASQQQPANTMPPWMLRHLNG

SEQ ID NO: 4791 - protein, 454 aa, Oryza sativa (japonica cultivar-group)
MAGGGRCSSLLRGFVSLFFLLFIHIGHAGCCFSTGSSTQTLEEDDTGHGADGRGGGGGGSKRRKISPLAFSPSVSSSTVADERSRARRRQVSSLATSVRFYLHRIFSYSSGAKNGAGAPAAEEEDEAVTTTVSSPLAQSSSCLPQRQASSSVVLSTPSSPCASPFLSPLSPQSLSITPAVPSSPHNRQIPQATTRQSSFRSFAARGDVFPCKVCGEVLSKPQQLELHQAMKHSLSELSSLDSSMNIIRMIFLAGWKPAVMPGAGEPPSVRRILRIHHNPRVLTRFEEYRDLVRARAARRCAGAGAAAVEERCVADGNERLRFYCSTMLCTLGAGVCGSPYCCTCSILRHGFAGKQADVTASPPTPPAGAAHASLPDDVEREFAFLQVRRAMLVCRVVAGRVGRGAADDKVAYDSMVPLLPTSSFAAATRGDDDVELLVFNPRAVLPCFVIIYSC

SEQ ID NO: 4792 - protein, 211 aa, Glycine max
MQDPTLFQPMKPHFPEQEQLKCPRCDSTNTKFCYYNNYNLSQPRHFCKNCRRYWTKGGALRNIPVGGGSRKNTKRSSSSNNNTKRASPSPPVSSAPAPEPDPTRIGPTPVVGGGSFSSLLASSGHLGLGNLLEGLNSSGSNLKTVQMEEFGENVSSGPVADPDSGRNPGLEMQSNGNAENFLSLQNGDSSCWNGTSGWSHLAIFTPGSSFQ

SEQ ID NO: 4793 - protein, 203 aa, Glycine max
MTRGLRLLQSAAAPPPEAVAAAVESDFVVILAALLCALICVVGLVAIARCAWLRRGTAGSSAAGAVSSPATANKGLKKKVVNSLPKFTYADDGDRRKWSECAICLTEFGAGDEVRVLPQCGHGFHVACVDTWLASHSSCPSCRAPFAVVARCQKCGHFPAVASASAASESKAVGCDNAAVSAANANRNNVIITNGFSNYGFLP

SEQ ID NO: 4794 - protein, 611 aa, Oryza sativa (japonica cultivar-group)
MAMVEQEGCVENRQPLAASSSSVSDGSSYGGGGGGLAQMSPPVRKFFARFPSVGILLWEGSRKADKRANKESKGWLDTRGVTQSLLLIGLNLSQQDETLRKAVEAYKAECFPYRTEVQCLHRWQKVLNPELIKGPWTQEVCHVADFALMEDDQIIDLVKKYGPTKWSVIAKALPGRIGKQCRERWHNHLNPEIRKDAWTTEEEQALINAHRIYGNKWAEIAKVLPGRTDNSIKNHWNSSLRKKQDMYNTSNNMVVPKLLVHDKFKDKPKLMAMEGHLDLNKAPIINSKDQPGTAHRSNCSGFLSRSSLPTAQPLTSREASVVDGSAVTLVAQALESDSVRGKGLEIDSVHEKGLEVNSAPDHTGNSWTIQLEAAPSKGEAELSLKNEARSLGPLCYQIPNMEDVVPVSSSLFSDHLTGNHTSEHCGDDILSPAGCTTPPPTKGKLTSQLSVDSILKSAANSFPGTPSILKRRKRDKSTPVSASEMKISGSNTDRFYTPMGMEPATATPESFKTTSFLSLGSLDGSVKSFDVSPQYRARSKRMALTKTVEKQLDFSSDGLDTCGSEILNSSCNNSQSTLSITEAPKLKEKEHAVQLENLTKNFAHTTNLDVT

SEQ ID NO: 4795 - protein, 270 aa, Zea mays
MGRGKVQLKRIENKINRQVTFSKRRNGLLKKAHEISVLCDAEVAVIVFSPKGKLYEYASDSRMDKILERYERYSYAEKALISAESESEGNWCHEYRKLKAKIETIQRCHKHLMGEDLESLNPKELQQLEQQLESSLKHIRSRKSHLMAESISELQKKERSLQEENKILQKELSERQKAVASRQQQQQQVQWDQQTQVQVQTSSSSSSFMMRQDQQGLPPPQNICFPPLSIGERGEEVAAAAQQQLPPPGQAQPQLRIAGLPPWMLSHLNA

SEQ ID NO: 4796 - protein, 427 aa, Oryza sativa
FFDGIFYGKGDDEEENGRFLSLCLLGFWNFGNLWFLLCVYVGAFWTEKDGKMDALKSSCRSEEAADEGAAAAPSAWGMVERDGFSVEDLLDLEEFCEAEKDAAEENEQALALVAAPEEEKSKDDSQPSSVVTYELVAPPPPPPEIVDLPAHDVEELEWVSRIMDDSLSELPPPPQPPASVVASLAARPPQPRQLQRRPQDGAYRALPPASYPVRTPTICALSTEALVPVKAKRSKRSRATAWSLSGAPPFSDSTSSSSTTTTSSCSSSASFSSFSPLLKFEWHPLGGTSDLPDDHLLPPGKKSKHGKNGKNKPKKRGRKPKQLPPHPSGAAASAPAPGDRRCSHCGVQKTPQWRAGPEGAKTLCNACGVRYKSGRLLPEYRPACSPTFVSAIHSNSHRKVLEMRRKKEVGSGLLTAAAAAAPAVASF

SEQ ID NO: 4797 - protein, 259 aa, Brassica oleracea var. botrytis
MGRGRVEMKRIENKINRQVTFSKRRNGLLKKAYELSVLCDAEVALIVFSSRGKLYEFGSVGVERTIERYHRCYNCSVTNNRPEESKQNWCQEVAKLKAKYESLVRTNRHLLGEDIGEMGVKQLQALERQLEAALTATRQRKTQVMMEEMEDLRKKERQLGDINKQLKIKFEAGGHAFKSFQDFWPNSAASMAGDPNNSKFPVQPSHPDSVDCNTEPFLQIGLVLVYIRFQQHYYVQGEGSSVPKSNVACETNFVQDWFL

SEQ ID NO: 4798 - protein, 245 aa, Triticum aestivum
  misc_feature (211)..(211): Xaa can be any naturally occurring amino acid
  misc_feature (221)..(221): Xaa can be any naturally occurring amino acid
MARGKVQLRRIENPVHRQVTFCKRRAGLLKKARELSVLCDADIGIIIFSAHGKLYDLATTGTMDGLIERYKSASGEGMTGDGCGDQRVDPKQEAMVLKQEIDLLQKGLRYIYGNRANEHMNVDELNALERYLEIWMFNIRSAKMQIMIQEIQALKSKEGMLKAANEILQEKIVEQHGLIDVGMTIADQQNGHFSTVPMLEEITNPLTILSXGYSTCRGSEXGLFLLMVDNALRGLLLVCNMVGNT

SEQ ID NO: 4799 - protein, 525 aa, Solanum chacoense
MASSGGNMNSFMNSFNSFSSSQFMTSSFSDLLSDNNDNNNKNWGFSDDRIKSFPMINSSSSPASPSSYLAFPHSLSPSMLLDSPVLFNNSNTLSSPTSGSFGNLNSKEGNSRSSEFSFQSRPATSSSIFQSSAPRNSLEDLMTRQQQTTEFSTAKTGVKSEVAPIQSFSQENMPNNPAPVHYCQPSQYVREQKAEDGYNWRKYGQKQVKGSENPRSYYKCTFPNCPTKKKVERNLDGHITEIVYKGSHNHPKPQSTRRSSSQSIQNLAYSNLDVTNQPNAFHENGQRDSFAVTDNSSASFGDEDVDQGSPISKSGENDENEPEAKRWKGDNENEVISSASRTVREPRIVVQTTSDIDILDDGYRWRKYGQKVVKGNPNPRSYYKCTFTGCPVRKHVERASHDLRAVITTYEGKHNHDVPAARGSGSYAMNRPPTGSNNNMPVVPRPTVLANHSNQGMNFNDTFFNTTQIQPPITLQMLQSSGSSSYSGFGNSSGSYMNQMQHTNNSKPISKEEPKDDLFFSSFLN

SEQ ID NO: 4800 - protein, 154 aa, Schizosaccharomyces pombe 972h-
MAEGNKAVDLTSLSLEQLSEVIKQLDSELEYLSTSYGQLGRAQLKFRECLANVNDAVRAENDGKEVLVPLTSSLYVPGKLNLGNSKLLVDIGTGYYVEKSAGEATEYYKRKCEYLASSIENLNNAIDAKSVQIRAVQNIMQQKATATTAATKSS

SEQ ID NO: 4801 - protein, 256 aa, Oryza sativa (indica cultivar-group)
MDGGYGSVTIVHDARSPEDVFQDFCGRRSGIVKALTIEVEKFYKQCDPEKENLCLYGLPNGTWAVTLPADEVPPELPEPALGINFARDGMQEKDWLSLIAVHSDSWLLSVAFYFGARFGFDKKARERLFMMTSSLPTVFEVVSGGVNTQSKTANGSSKNKSGSKPPKRPNSDSKPQRQVQAKYEEENGGRGNGGDEDQAETICGACGEAYANGEFWICCDICETWFHGKCVRITPAKAEHIKHYKCPGCSNKRTRE

SEQ ID NO: 4802 - protein, 209 aa, Oryza sativa
  misc_feature (204)..(204): Xaa can be any naturally occurring amino acid
MARGKVQLRRIENPVHRQVTFCKRRAGLLKKARELSILCEADIGIIIFSAHGKLYDLATTGTMEELIERYKSASGEQANACGDQRMDPKQEAMVLKQEINLLQKGLRYIYGNRANEHMTVEELNALERYLEIWMYNIRSAKEGMLKAANEILQEKIVEQNGLIDVGMMVADQQNGHFSTVPLLEEITNPLTILSGYSTCRGSEXGLFLL

SEQ ID NO: 4803 - protein, 75 aa, Oryza sativa (indica cultivar-group)
MASEWSKEENKLFEQAIAYYGEGAPDLWHKVSRAMGGTKTADEVRRHFEILVDDIKLIEARRVPFPKYNTQGAWN

SEQ ID NO: 4804 - protein, 307 aa, Triticum aestivum
MDAAARKRSRPESANGGSAGGKRSRESESQQTGLSSKSKPCTKFFSTVGCPFGEGCHFAHFVPGGYQAVSKSHSLGHAAVSAASRAPADHAASGVKTRMCTKYNTAEGCKFGDKCHFAHGERELGRPPSSYMSQESSYAPPMGGRYGGRHEPPPPASMGPPAGNFGASSTCKVSVDAALAGGIIGKGGVNTKQICRITGVKLSIRDHESNPDLKNIELEGSFDQIKQANDMVRDLIASISASTPSKNPAGTAAPAGRGGGGGGGGGPGGRSNYKTKICENFLKGTCTFGERCHFAHGETEQRKGAAV

SEQ ID NO: 4805 - protein, 276 aa, Triticum aestivum
MMSMMADLSCGASGVTANDHQLAAPAPEDSAVAGSEKMGRGRIEIKRIENTTNRQVTFCKRRNGLLKKAYELSVLCDAEVALIVFSSRGRLYEYSNNSVKATIERYKKANSDTSNSGTVAEVNAQYYQQESSKLRQQISSLQNSNSRSLVRDSVSTMTLRDLKQLEGRLEKGIAKIRARKNELMYAEVEYMQKREMELHNDNIYLRSKVSENERGQQPMNMMASGSTSSEYDHMVPPFDSRNFLQANILQQQQQQQQHYSQQLQPTALQLGQQYFN

SEQ ID NO: 4806 - protein, 174 aa, Zea mays
MTIPSRILETAATPPPQPSEQILAAESDMVVILSALLCALICVAGLAAIVRCSCLRRFTAGGNSPSQNKGLKKKALQSLPRSTFTAAESTSGGAAEDGGDSTECAICLTEFADGEEIRVLPLCGHSFHVACIDKWLVSRSSCPSCRRILTPVRCGRCGHSSTAGRQSKDHQHDQ

SEQ ID NO: 4807 - protein, 113 aa, Oryza sativa
MEKIMGENEIRTRSPVSRRDMASSSKASSSSSASAASSEWTKQQNKQFERALAVYDTDAPDRWHNVARYMGGAKSAEEVRRHYERLQADVEQIEAGGVPFSLGYGATPQAGRR

SEQ ID NO: 4808 - protein, 240 aa, Pisum sativum
MGRGRVQLKRIENKINRQVTFSKRRAGLLKKAHEISVLCDAEVALIVFSHKGKLFEYATDSCMEKILERYERYSYAERQLVANDSESQGNWTIEYTRLKAKIDLLQRNYRHYMGEDLGTMSLKELQSLEQQLDTALKLIRTRRNQLMYESISELQKKEKVIQEQNNMLAKKIKEKEKIAAEQQVQWEHPNHHGVNPNYLLHQQLPSLNMGGNYREEAPEMGRNELDLTLEPLYTCHLGCF

SEQ ID NO: 4809 - protein, 273 aa, Oryza sativa
MRHLLQSSEHLTAATATAAASGGRGVHTDTFLILAAVLCFLLCVVGLALVARCSRLCNPSSFAVEAEEAMPPAPCKGLKRKALLSLPTVSFAEAAAAEEEEERPECAICLAEFARGDEVRVLPPCGHGFHAACVDVWLVSTSTCPSCRRAIVVLAAPSPAVTAAATDPPPPCCAADAAQACVTATATHRRQRPRRSAGHRCRRAPGSLSLAYVHHSIVHTHTPSKNVNSRYVFREIFSCTTQQCNCSRYMCSVNTCMYTSLLINHHFPFFFER

SEQ ID NO: 4810 - protein, 227 aa, Triticum aestivum
MGRGKIEIKRIENATNRQVTYSKRRSGIMKKARELTVLCDAQVAIIMFSSTGKYHEFCSTGTDIKGIFDRYQQAIGTSLWIEQYENMQRTLSHLKDINRNLRTEIRMGEDLDALEFEELRDLEQNVDAALKEVRQRKYHVITTQTETYKKKVKHSQEAYKNLQQELGMREDPAYGFVDNPAAGGWDGVAAVAMGGGSAADMYAFRVVPSQPNLHGMAYGGSHDLRLG

SEQ ID NO: 4811 - protein, 226 aa, Zea mays
MGRGKIEIKRIENATNRQVTYSKRRTGIMKKARELTVLCDAQVAIIMFSSTGKYHEFCSPGTDIKTIFDRYQQAIGTSLWIEQYENMQRTLSHLKDINRGLRTEIRQRMGEDLDSLDFDELRGLEQNVDAALKEVRHRKYHVISTQTDTYKKKVKHSHEAYKNLQQELGMREDPAFGYVDNTGAGVAWDGAAALGGAPPDMYAFRVVPSQPNLHGMAYGFHDLRLG

SEQ ID NO: 4812 - protein, 208 aa, Litchi chinensis
MGRGKIEIKRIENSSDRQVTYSKRRNGIIKKAKEITVLCDAKVSLIIFASSGKMHEYCSPSTTLVEILDQYHKQSGKKLWDPKHENLSSEIDRIKKENDSMQIKLRHLKGEDLTSLNHRELMAIEEALENGLAGLRDKQSEHVEGMRENLKELEETHKHLNFVMRQREMAMENNVRELESGYHQQPYQRAAVNHNDYNPQMPFAFREL

SEQ ID NO: 4813 - protein, 216 aa, Arabis pumila
MSSFSAFSEMFGSDYESMISSVGDYSPTLATSCPKKPAGRKKFRETRHPVYRGVRQRNSGKWVSELREPNKKTRIWLGTFQTAEMAARAHDVAAIALRGRSACLNFADSVWRLRIPESACAKDIQKAAAEAALAFQNELMSDTATTDHGLDMEETLVEAIVTAEQIDTFYIDEETMFGMPSLMANMAEGMLLPLPSIQWINNYDVEGDADMPLWSY

SEQ ID NO: 4814 - protein, 260 aa, Solanum lycopersicum
MCGGAILADIIPPRDRRLSSTDLWPTDFWPISTQNVPLNPKRARPSTGGEQMKKRQRKNLYRGIRQRPWGKWAAEIRDPRKGVRVWLGTFNTAEEAARAYDREARKIRGKKAKVNFPNEDDDHYCYSHPEPPPLNIACDTTVTYNQESNNCYPFYSIENVEPVMEFASYNGIEDGGEEMVKNLNNRVVEEEEKTEDEVQILSDELMAYESLMKFYEIPYVDGQSVAATVNPAAETAVGGGSMELWSFDDVSRVQPSYNVV

SEQ ID NO: 4815 - protein, 183 aa, Eucalyptus grandis
MGRGRVELKRIENKINRQVTFAKRRNGLLKKAYELSVLCDAEVGLIIFSNRGKLYEFCSSSSMLKTLERYQKCNYGALEPNVSARESLELSCQQEYLRLKARYEGLQRTQRNLLGEELGQLCSKELESLERQLDGSLKQIRSRRTQYMLDQVTDLQHREQVVHEANRTLNQRLMEGYQVMRSS

SEQ ID NO: 4816 - DNA, 12554 bp, artificial
  pMON93039
agcttgatctcgtcaatttttcccttttgtaattttgtaatttataatttactttcctgtatgcttctaactctgtcgttttaaaattttaataaaatttcagtaggggcttgcccctcctgtcctataaaaaaaagttgacgtgaatagatttcattaagaggttggatgttagtgggatgacatgactattagtaggacgagatgatgtggaaagttagtgggagatgatatggatagtttttgctttcatcgaaaggttggaagttagtatgatgacatggctaatatagatacatagatatagactaccaacatggctgcatgcccccaagctctcccactatatatatctctggtagcacatcatcccaattcacaatgcttacaaaaacccatccatcattttagctgttgatacaaaagagctcgaagggagatctaccgtcttcggtacgcgctcactccgccctctgcctttgttactgccacgtttctctgaatgctctcttgtgtggtgattgctgagagtggtttagctggatctagaattacactctgaaatcgtgttctgcctgtgctgattacttgccgtcctttgtagcagcaaaatatagggacatggtagtacgaaacgaagatagaacctacacagcaatacgagaaatgtgtaatttggtgcttagcggtatttatttaagcacatgttggtgttatagggcacttggattcagaagtttgctgttaatttaggcacaggcttcatactacatgggtcaatagtatagggattcatattataggcgatactataataatttgttcgtctgcagagcttattatttgccaaaattagatattcctattctgtttttgtttgtgtgctgttaaattgttgatcccgatttggcaagtgttccagagcaaaagctggaagctctcgtagtctgagcctctttgctgattcatacaagttatgaccatctacatggatcgtctcaccaagaaatttgtagactgcaggatttttccctgaccggagtgcaccagctgggttccaactgaatttataggcaagcggattgtttgctgcagctggagatggcaatccaccacagtaagatgtaaatgcctttatttttccctttcgtgcatgagcttcatcaatcatcttcattgacatcaagtgatctatgccaggatctaggcccatttcacaaagtatagttacacctgcatctttggcagcttggctcaagtttgacatggattcatcaacatagcttgccgttaccatgtgcttcttcaactctatgcatactcctgcaatggcagcatgaaaactagcaggcagcaagctaattacaacctcaacctgagaaacaagatctgaaaggcttccaatatcagcaacatcaagctgggtagcagttgtattttcaataccatcaactgtctcttctgcatctttttgatacaaagatgccacgataacatgaatttgatctgcatcatggtcatcaacaccataggtacatatgtctgggtaagatgccagaaactcagcagctggccgacagactcttccagctccaaaccggtgctgcctgctagttttcatgctgccattgcaggagtatgcatagagttgaagaagcacatggtaacggcaagctatgttgatgaatccatgtcaaacttgagccaagctgccaaagatgcaggtgtaactatactttgtgaaatgggcctagatcctggcatagatcacttgatgtcaatgaagatgattgatgaagctcatgcacgaaagggaaaaataaaggcatttacatcttactgtggtggattgccatctccagctgcagcaaacaatccgcttgcctataaattcagttggaacccagctggtgcactccggtcagggaaaaatcctgcagtctacaaatttcttggtgagacgatccatgtagatggtcataacttgtatgaatcagcaaagaggctcagactacgagagcttccagcttttgctctggaacacttgccaaatcggaattaacgcctgaaggaataaatataaatgacgaaattttgatgtttatctctgctcctttattgtgaccataagtcaagatcagatgcacttgttttaaatattgttgtctgaagaaataagtactgacagtattttgatgcattgatctgcttgtttgttgtaacaaaatttaaaaataaagagtttcctttttgttgctctccttacctcctgatggtatctagtatctaccaactgacactatattgcttctctttacatacgtatcttgctcgatgccttctccctagtgttgaccagtgttactcacatagtctttgctcatttcattgtaatgcagataccaagcggatccatggtttcgccgacgaatctcctcccggcgcggaagatcacccctgtctcaaatggcggcgcagcgacggcgagcccctcttctccctcggtggccgcacggccacggcgactcccttcaggcctccaatctgtgactggtagagggaaggtttccttggcagccatcactagcacaggtttaacagctaagaccggagtagagcactttggcaccgtgggagtagcaatggtaactccattcacggaaagtggagacatcgatatagctgctggccgcgaggtcgcggcttatctagtcgataaaggcttggattctttggtgctcgcgggcaccactggtgaatccccaacgacaaccgccgctgagaaactagaactgctcaaggccgtgcgtgaggaagtaggggatagggcgaaactaatcgccggtgtcggaaccaataacacgcggacatctgtggaacttgcggaggctgctgcttctgctggcgcagacggccttttagtcgtaactccttattacagtaagccgagccaggagggattgctggcgcacttcggggcaatcgcagcagcaacagaggtgccaatttgcctctacgacattcctggtaggtcaggtattccaattgagtctgataccatgagacgcctgagtgaattacctacgattttggcggtcaaagacgccaaaggggacctggttgcagccacgtcattgatcaaagaaacgggacttgcctggtattcaggcgatgacccactaaaccttgtttggcttgctttgggcggatcaggttttatatccgtaattggacatgcagcccccacagcattaagggagttgtacacaagtttcgaggaaggcgacctggtccgtgcgagggagatcaacgccaaactatcaccgctggtagctgcccagggtcgcttgggtggagtcagcttggcaaaagctgctctgcgtctgcaaggcatcaacgtaggagatcctaggcttccaataatggctccaaatgagcaggaacttgaggctctgcgagaagacatgaaaaaagctggagttctataagaattctgcatgcgtttggacgtatgctcattcaggttggagccaatttggttgatgtgtgtgcgagttcttgcgagtctgatgagacatctctgtattgtgtttctttccccagtgttttctgtacttgtgtaatcggctaatcgccaacagattcggcgatgaataaatgagaaataaattgttctgattttgagtgcaaaaaaaaaggaattgatatcggcgcgttaattaagcggccgcatcgatcgtgaagtttctcatctaagcccccatttggacgtgaatgtagacacgtcgaaataaagatttccgaattagaataatttgtttattgctttcgcctataaatacgacggatcgtaatttgtcgttttatcaaaatgtactttcattttataataacgctgcggacatctacatttttgaattgaaaaaaaattggtaattactctttctttttctccatattgaccatcatactcattgctgatccatgtagatttcccggacatgaagccatttacaattgaatatatcctgccgccgctgccgctttgcacccggtggagcttgcatgttggtttctacgcagaactgagccggttaggcagataatttccattgagaactgagccatgtgcaccttccccccaacacggtgagcgacggggcaacggagtgatccacatgggacttttgtacactcgaggtcattcatatgcttgagaagagagtcgggatagtccaaaataaaacaaaggtaagattacctggtcaaaagtgaaaacatcagttaaaaggtggtataaagtaaaatatcggtaataaaaggtggcccaaagtgaaatttactcttttctactattataaaaattgaggatgtttttgtcggtactttgatacgtcatttttgtatgaattggtttttaagtttattcgcttttggaaatgcatatctgtatttgagtcgggttttaagttcgtttgcttttgtaaatacagagggatttgtataagaaatatctttagaaaaacccatatgctaatttgacataatttttgagaaaaatatatattcaggcgaattctcacaatgaacaataataagattaaaatagctttcccccgttgcagcgcatgggtattttttctagtaaaaataaaagataaacttagactcaaaacatttacaaaaacaacccctaaagttcctaaagcccaaagtgctatccacgatccatagcaagcccagcccaacccaacccaacccaacccaccccagtccagccaactggacaatagtctccacacccccccactatcaccgtgagttgtccgcacgcaccgcacgtctcgcagccaaaaaaaaaaagaaagaaaaaaaagaaaaagaaaaaacagcaggtgggtccgggtcgtgggggccggaaacgcgaggaggatcgcgagccagcgacgaggccggccctccctccgcttccaaagaaacgccccccatcgccactatatacatacccccccctctcctcccatccccccaaccctaccaccaccaccaccaccacctccacctcctcccccctcgctgccggacgacgagctcctcccccctccccctccgccgccgccgcgccggtaaccaccccgcccctctcctctttctttctccgtttttttttccgtctcggtctcgatctttggccttggtagtttgggtgggcgagaggcggcttcgtgcgcgcccagatcggtgcgcgggaggggcgggatctcgcggctggggctctcgccggcgtggatccggcccggatctcgcggggaatggggctctcggatgtagatctgcgatccgccgttgttgggggagatgatggggggtttaaaatttccgccgtgctaaacaagatcaggaagaggggaaaagggcactatggtttatatttttatatatttctgctgcttcgtcaggcttagatgtgctagatctttctttcttctttttgtgggtagaatttgaatccctcagcattgttcatcggtagtttttcttttcatgatttgtgacaaatgcagcctcgtgcggagcttttttgtaggtagaagtgatcaaccatggcgcaagttagcagaatctgcaatggtgtgcagaacccatctcttatctccaatctctcgaaatccagtcaacgcaaatctcccttatcggtttctctgaagacgcagcagcatccacgagcttatccgatttcgtcgtcgtggggattgaagaagagtgggatgacgttaattggctctgagcttcgtcctcttaaggtcatgtcttctgtttccacggcgtgcatgcttcacggtgcaagcagccggcccgcaaccgcccgcaaatcctctggcctttccggaaccgtccgcattcccggcgacaagtcgatctcccaccggtccttcatgttcggcggtctcgcgagcggtgaaacgcgcatcaccggccttctggaaggcgaggacgtcatcaatacgggcaaggccatgcaggcgatgggcgcccgcatccgtaaggaaggcgacacctggatcatcgatggcgtcggcaatggcggcctcctggcgcctgaggcgccgctcgatttcggcaatgccgccacgggctgccgcctgacgatgggcctcgtcggggtctacgatttcgacagcaccttcatcggcgacgcctcgctcacaaagcgcccgatgggccgcgtgttgaacccgctgcgcgaaatgggcgtgcaggtgaaatcggaagacggtgaccgtcttcccgttaccttgcgcgggccgaagacgccgacgccgatcacctaccgcgtgccgatggcctccgcacaggtgaagtccgccgtgctgctcgccggcctcaacacgcccggcatcacgacggtcatcgagccgatcatgacgcgcgatcatacggaaaagatgctgcagggctttggcgccaaccttaccgtcgagacggatgcggacggcgtgcgcaccatccgcctggaaggccgcggcaagctcaccggccaagtcatcgacgtgccgggcgacccgtcctcgacggccttcccgctggttgcggccctgcttgttccgggctccgacgtcaccatcctcaacgtgctgatgaaccccacccgcaccggcctcatcctgacgctgcaggaaatgggcgccgacatcgaagtcatcaacccgcgccttgccggcggcgaagacgtggcggacctgcgcgttcgctcctccacgctgaagggcgtcacggtgccggaagaccgcgcgccttcgatgatcgacgaatatccgattctcgctgtcgccgccgccttcgcggaaggggcgaccgtgatgaacggtctggaagaactccgcgtcaaggaaagcgaccgcctctcggccgtcgccaatggcctcaagctcaatggcgtggattgcgatgagggcgagacgtcgctcgtcgtgcgtggccgccctgacggcaaggggctcggcaacgcctcgggcgccgccgtcgccacccatctcgatcaccgcatcgccatgagcttcctcgtcatgggcctcgtgtcggaaaaccctgtcacggtggacgatgccacgatgatcgccacgagcttcccggagttcatggacctgatggccgggctgggcgcgaagatcgaactctccgatacgaaggctgcctgatgagctcgaattcccgatcgttcaaacatttggcaataaagtttcttaagattgaatcctgttgccggtcttgcgatgattatcatataatttctgttgaattacgttaagcatgtaataattaacatgtaatgcatgacgttatttatgagatgggtttttatgattagagtcccgcaattatacatttaatacgcgatagaaaacaaaatatagcgcgcaaactaggataaattatcgcgcgcggtgtcatctatgttactagatcggggatgggggatctcagcccctggggggatgggaggcccgcgttagcgggccgggagggttcgagaagggggggcaccccccttcggcgtgcgcggtcacgcgcacagggcgcagccctggttaaaaacaaggtttataaatattggtttaaaagcaggttaaaagacaggttagcggtggccgaaaaacgggcggaaacccttgcaaatgctggattttctgcctgtggacagcccctcaaatgtcaataggtgcgcccctcatctgtcagcactctgcccctcaagtgtcaaggatcgcgcccctcatctgtcagtagtcgcgcccctcaagtgtcaataccgcagggcacttatccccaggcttgtccacatcatctgtgggaaactcgcgtaaaatcaggcgttttcgccgatttgcgaggctggccagctccacgtcgccggccgaaatcgagcctgcccctcatctgtcaacgccgcgccgggtgagtcggcccctcaagtgtcaacgtccgcccctcatctgtcagtgagggccaagttttccgcgaggtatccacaacgccggcggccggccgcggtgtctcgcacacggcttcgacggcgtttctggcgcgtttgcagggccatagacggccgccagcccagcggcgagggcaaccagcccggtgagcgtcggaaagggtcgatcgaccgatgcccttgagagccttcaacccagtcagctccttccggtgggcgcggggcatgactatcgtcgccgcacttatgactgtcttctttatcatgcaactcgtaggacaggtgccggcagcgctctgggtcattttcggcgaggaccgctttcgctggagcgcgacgatgatcggcctgtcgcttgcggtattcggaatcttgcacgccctcgctcaagccttcgtcactggtcccgccaccaaacgtttcggcgagaagcaggccattatcgccggcatggcggccgacgcgctgggctacgtcttgctggcgttcgcgacgcgaggctggatggccttccccattatgattcttctcgcttccggcggcatcgggatgcccgcgttgcaggccatgctgtccaggcaggtagatgacgaccatcagggacagcttcaaggatcgctcgcggctcttaccagcctaacttcgatcattggaccgctgatcgtcacggcgatttatgccgcctcggcgagcacatggaacgggttggcatggattgtaggcgccgccctataccttgtctgcctccccgcgttgcgtcgcggtgcatggagccgggccacctcgacctgaatggaagccggcggcacctcgctaacggattcaccactccaagaattggagccaatcaattcttgcggagaactgtgaatgcgcaaaccaacccttggcagaacatatccatcgcgtccgccatctccagcagccgcacgcggcgcatctcgggcagcgttgggtcctggccacgggtgcgcatgatcgtgctcctgtcgttgaggacccggctaggctggcggggttgccttactggttagcagaatgaatcaccgatacgcgagcgaacgtgaagcgactgctgctgcaaaacgtctgcgacctgagcaacaacatgaatggtcttcggtttccgtgtttcgtaaagtctggaaacgcggaagtcagcgccctgcaccattatgttccggatctgcatcgcaggatgctgctggctaccctgtggaacacctacatctgtattaacgaagcgctggcattgaccctgagtgatttttctctggtcccgccgcatccataccgccagttgtttaccctcacaacgttccagtaaccgggcatgttcatcatcagtaacccgtatcgtgagcatcctctctcgtttcatcggtatcattacccccatgaacagaaatcccccttacacggaggcatcagtgaccaaacaggaaaaaaccgcccttaacatggcccgctttatcagaagccagacattaacgcttctggagaaactcaacgagctggacgcggatgaacaggcagacatctgtgaatcgcttcacgaccacgctgatgagctttaccgcagctgcctcgcgcgtttcggtgatgacggtgaaaacctctgacacatgcagctcccggagacggtcacagcttgtctgtaagcggatgccgggagcagacaagcccgtcagggcgcgtcagcgggtgttggcgggtgtcggggcgcagccatgacccagtcacgtagcgatagcggagtgtatactggcttaactatgcggcatcagagcagattgtactgagagtgcaccatatgcggtgtgaaataccgcacagatgcgtaaggagaaaataccgcatcaggcgctcttccgcttcctcgctcactgactcgctgcgctcggtcgttcggctgcggcgagcggtatcagctcactcaaaggcggtaatacggttatccacagaatcaggggataacgcaggaaagaacatgtgagcaaaaggccagcaaaaggccaggaaccgtaaaaaggccgcgttgctggcgtttttccataggctccgcccccctgacgagcatcacaaaaatcgacgctcaagtcagaggtggcgaaacccgacaggactataaagataccaggcgtttccccctggaagctccctcgtgcgctctcctgttccgaccctgccgcttaccggatacctgtccgcctttctcccttcgggaagcgtggcgctttctcatagctcacgctgtaggtatctcagttcggtgtaggtcgttcgctccaagctgggctgtgtgcacgaaccccccgttcagcccgaccgctgcgccttatccggtaactatcgtcttgagtccaacccggtaagacacgacttatcgccactggcagcagccactggtaacaggattagcagagcgaggtatgtaggcggtgctacagagttcttgaagtggtggcctaactacggctacactagaaggacagtatttggtatctgcgctctgctgaagccagttaccttcggaaaaagagttggtagctcttgatccggcaaacaaaccaccgctggtagcggtggtttttttgtttgcaagcagcagattacgcgcagaaaaaaaggatctcaagaagatcctttgatcttttctacggggtctgacgctcagtggaacgaaaactcacgttaagggattttggtcatgagattatcaaaaaggatcttcacctagatccttttaaattaaaaatgaagttttaaatcaatctaaagtatatatgagtaaacttggtctgacagttaccaatgcttaatcagtgaggcacctatctcagcgatctgtctatttcgttcatccatagttgcctgactccccgtcgtgtagataactacgatacgggagggcttaccatctggccccagtgctgcaatgataccgcgagacccacgctcaccggctccagatttatcagcaataaaccagccagccggaagggccgagcgcagaagtggtcctgcaactttatccgcctccatccagtctattaattgttgccgggaagctagagtaagtagttcgccagttaatagtttgcgcaacgttgttgccattgctgcaggtcgggagcacaggatgacgcctaacaattcattcaagccgacaccgcttcgcggcgcggcttaattcaggagttaaacatcatgagggaagcggtgatcgccgaagtatcgactcaactatcagaggtagttggcgtcatcgagcgccatctcgaaccgacgttgctggccgtacatttgtacggctccgcagtggatggcggcctgaagccacacagtgatattgatttgctggttacggtgaccgtaaggcttgatgaaacaacgcggcgagctttgatcaacgaccttttggaaacttcggcttcccctggagagagcgagattctccgcgctgtagaagtcaccattgttgtgcacgacgacatcattccgtggcgttatccagctaagcgcgaactgcaatttggagaatggcagcgcaatgacattcttgcaggtatcttcgagccagccacgatcgacattgatctggctatcttgctgacaaaagcaagagaacatagcgttgccttggtaggtccagcggcggaggaactctttgatccggttcctgaacaggatctatttgaggcgctaaatgaaaccttaacgctatggaactcgccgcccgactgggctggcgatgagcgaaatgtagtgcttacgttgtcccgcatttggtacagcgcagtaaccggcaaaatcgcgccgaaggatgtcgctgccgactgggcaatggagcgcctgccggcccagtatcagcccgtcatacttgaagctaggcaggcttatcttggacaagaagatcgcttggcctcgcgcgcagatcagttggaagaatttgttcactacgtgaaaggcgagatcaccaaggtagtcggcaaataatgtctaacaattcgttcaagccgacgccgcttcgcggcgcggcttaactcaagcgttagatgctgcaggcatcgtggtgtcacgctcgtcgtttggtatggcttcattcagctccggttcccaacgatcaaggcgagttacatgatcccccatgttgtgcaaaaaagcggttagctccttcggtcctccgatcgaggatttttcggcgctgcgctacgtccgcgaccgcgttgagggatcaagccacagcagcccactcgaccttctagccgacccagacgagccaagggatctttttggaatgctgctccgtcgtcaggctttccgacgtttgggtggttgaacagaagtcattatcgcacggaatgccaagcactcccgaggggaaccctgtggttggcatgcacatacaaatggacgaacggataaaccttttcacgcccttttaaatatccgattattctaataaacgctcttttctcttaggtttacccgccaatatatcctgtcaaacactgatagtttaaactgaaggcgggaaacgacaatctgatccccatca

SEQ ID NO: 4817 - DNA, 9769 bp, artificial
  pMON82053
ggtccgatgtgagacttttcaacaaagggtaatatccggaaacctcctcggattccattgcccagctatctgtcactttattgtgaagatagtggaaaaggaaggtggctcctacaaatgccatcattgcgataaaggaaaggccatcgttgaagatgcctctgccgacagtggtcccaaagatggacccccacccacgaggagcatcgtggaaaaagaagacgttccaaccacgtcttcaaagcaagtggattgatgtgatggtccgattgagacttttcaacaaagggtaatatccggaaacctcctcggattccattgcccagctatctgtcactttattgtgaagatagtggaaaaggaaggtggctcctacaaatgccatcattgcgataaaggaaaggccatcgttgaagatgcctctgccgacagtggtcccaaagatggacccccacccacgaggagcatcgtggaaaaagaagacgttccaaccacgtcttcaaagcaagtggattgatgtgatatctccactgacgtaagggatgacgcacaatcccactatccttcgcaagacccttcctctatataaggaagttcatttcatttggagaggaccaggtggtaccggcgcgcctcagcagtcgctgtcgttaacccagcggtactcgctgaggcgatcgcgggccctgatcacctgtcgtacagtatttctacatttgatgtgtgatttgtgaagaacatcaaacaaaacaagcactggctttaatatgatgataagtattatggtaattaattaattggcaaaaacaacaatgaagctaaaattttatttattgagccttgcggttaatttcttgtgatgatctttttttttattttctaattatatatagtttcctttgctttgaaatgctaaaggtttgagagagttatgctctttttttcttcctctttcttttttaactttatcatacaaattttgaataaaaatgtgagtacattgagctcatttaaataagcttgatggggatcagattgtcgtttcccgccttcagtttaaactatcagtgtttgacaggatatattggcgggtaaacctaagagaaaagagcgtttattagaataatcggatatttaaaagggcgtgaaaaggtttatccgttcgtccatttgtatgtgcatgccaaccacagggttcccctcgggagtgcttggcattccgtgcgataatgacttctgttcaaccacccaaacgtcggaaagcctgacgacggagcagcattccaaaaagatcccttggctcgtctgggtcggctagaaggtcgagtgggctgctgtggcttgatccctcaacgcggtcgcggacgtagcgcagcgccgaaaaatcctcgatcggaggaccgaaggagctaaccgcttttttgcacaacatgggggatcatgtaactcgccttgatcgttgggaaccggagctgaatgaagccataccaaacgacgagcgtgacaccacgatgcctgcagcatctaacgcttgagttaagccgcgccgcgaagcggcgtcggcttgaacgaattgttagacattatttgccgactaccttggtgatctcgcctttcacgtagtgaacaaattcttccaactgatctgcgcgcgaggccaagcgatcttcttgtccaagataagcctgcctagcttcaagtatgacgggctgatactgggccggcaggcgctccattgcccagtcggcagcgacatccttcggcgcgattttgccggttactgcgctgtaccaaatgcgggacaacgtaagcactacatttcgctcatcgccagcccagtcgggcggcgagttccatagcgttaaggtttcatttagcgcctcaaatagatcctgttcaggaaccggatcaaagagttcctccgccgctggacctaccaaggcaacgctatgttctcttgcttttgtcagcaagatagccagatcaatgtcgatcgtggctggctcgaagatacctgcaagaatgtcattgcgctgccattctccaaattgcagttcgcgcttagctggataacgccacggaatgatgtcgtcgtgcacaacaatggtgacttctacagcgcggagaatctcgctctctccaggggaagccgaagtttccaaaaggtcgttgatcaaagctcgccgcgttgtttcatcaagccttacggtcaccgtaaccagcaaatcaatatcactgtgtggcttcaggccgccatccactgcggagccgtacaaatgtacggccagcaacgtcggttcgagatggcgctcgatgacgccaactacctctgatagttgagtcgatacttcggcgatcaccgcttccctcatgatgtttaactcctgaattaagccgcgccgcgaagcggtgtcggcttgaatgaattgttaggcgtcatcctgtgctcccgacctgcagcaatggcaacaacgttgcgcaaactattaactggcgaactacttactctagcttcccggcaacaattaatagactggatggaggcggataaagttgcaggaccacttctgcgctcggcccttccggctggctggtttattgctgataaatctggagccggtgagcgtgggtctcgcggtatcattgcagcactggggccagatggtaagccctcccgtatcgtagttatctacacgacggggagtcaggcaactatggatgaacgaaatagacagatcgctgagataggtgcctcactgattaagcattggtaactgtcagaccaagtttactcatatatactttagattgatttaaaacttcatttttaatttaaaaggatctaggtgaagatcctttttgataatctcatgaccaaaatcccttaacgtgagttttcgttccactgagcgtcagaccccgtagaaaagatcaaaggatcttcttgagatcctttttttctgcgcgtaatctgctgcttgcaaacaaaaaaaccaccgctaccagcggtggtttgtttgccggatcaagagctaccaactctttttccgaaggtaactggcttcagcagagcgcagataccaaatactgtccttctagtgtagccgtagttaggccaccacttcaagaactctgtagcaccgcctacatacctcgctctgctaatcctgttaccagtggctgctgccagtggcgataagtcgtgtcttaccgggttggactcaagacgatagttaccggataaggcgcagcggtcgggctgaacggggggttcgtgcacacagcccagcttggagcgaacgacctacaccgaactgagatacctacagcgtgagctatgagaaagcgccacgcttcccgaagggagaaaggcggacaggtatccggtaagcggcagggtcggaacaggagagcgcacgagggagcttccagggggaaacgcctggtatctttatagtcctgtcgggtttcgccacctctgacttgagcgtcgatttttgtgatgctcgtcaggggggcggagcctatggaaaaacgccagcaacgcggcctttttacggttcctggccttttgctggccttttgctcacatgttctttcctgcgttatcccctgattctgtggataaccgtattaccgcctttgagtgagctgataccgctcgccgcagccgaacgaccgagcgcagcgagtcagtgagcgaggaagcggaagagcgcctgatgcggtattttctccttacgcatctgtgcggtatttcacaccgcatatggtgcactctcagtacaatctgctctgatgccgcatagttaagccagtatacactccgctatcgctacgtgactgggtcatggctgcgccccgacacccgccaacacccgctgacgcgccctgacgggcttgtctgctcccggcatccgcttacagacaagctgtgaccgtctccgggagctgcatgtgtcagaggttttcaccgtcatcaccgaaacgcgcgaggcagctgcggtaaagctcatcagcgtggtcgtgaagcgattcacagatgtctgcctgttcatccgcgtccagctcgttgagtttctccagaagcgttaatgtctggcttctgataaagcgggccatgttaagggcggttttttcctgtttggtcactgatgcctccgtgtaagggggatttctgttcatgggggtaatgataccgatgaaacgagagaggatgctcacgatacgggttactgatgatgaacatgcccggttactggaacgttgtgagggtaaacaactggcggtatggatgcggcgggaccagagaaaaatcactcagggtcaatgccagcgcttcgttaatacagatgtaggtgttccacagggtagccagcagcatcctgcgatgcagatccggaacataatggtgcagggcgctgacttccgcgtttccagactttacgaaacacggaaaccgaagaccattcatgttgttgctcaggtcgcagacgttttgcagcagcagtcgcttcacgttcgctcgcgtatcggtgattcattctgctaaccagtaaggcaaccccgccagcctagccgggtcctcaacgacaggagcacgatcatgcgcacccgtggccaggacccaacgctgcccgagatgcgccgcgtgcggctgctggagatggcggacgcgatggatatgttctgccaagggttggtttgcgcattcacagttctccgcaagaattgattggctccaattcttggagtggtgaatccgttagcgaggtgccgccggcttccattcaggtcgaggtggcccggctccatgcaccgcgacgcaacgcggggaggcagacaaggtatagggcggcgcctacaatccatgccaacccgttccatgtgctcgccgaggcggcataaatcgccgtgacgatcagcggtccaatgatcgaagttaggctggtaagagccgcgagcgatccttgaagctgtccctgatggtcgtcatctacctgcctggacagcatggcctgcaacgcgggcatcccgatgccgccggaagcgagaagaatcataatggggaaggccatccagcctcgcgtcgcgaacgccagcaagacgtagcccagcgcgtcggccgccatgccggcgataatggcctgcttctcgccgaaacgtttggtggcgggaccagtgacgaaggcttgagcgagggcgtgcaagattccgaataccgcaagcgacaggccgatcatcgtcgcgctccagcgaaagcggtcctcgccgaaaatgacccagagcgctgccggcacctgtcctacgagttgcatgataaagaagacagtcataagtgcggcgacgatagtcatgccccgcgcccaccggaaggagctgactgggttgaaggctctcaagggcatcggtcgatcgaccctttccgacgctcaccgggctggttgccctcgccgctgggctggcggccgtctatggccctgcaaacgcgccagaaacgccgtcgaagccgtgtgcgagacaccgcggccggccgccggcgttgtggatacctcgcggaaaacttggccctcactgacagatgaggggcggacgttgacacttgaggggccgactcacccggcgcggcgttgacagatgaggggcaggctcgatttcggccggcgacgtggagctggccagcctcgcaaatcggcgaaaacgcctgattttacgcgagtttcccacagatgatgtggacaagcctggggataagtgccctgcggtattgacacttgaggggcgcgactactgacagatgaggggcgcgatccttgacacttgaggggcagagtgctgacagatgaggggcgcacctattgacatttgaggggctgtccacaggcagaaaatccagcatttgcaagggtttccgcccgtttttcggccaccgctaacctgtcttttaacctgcttttaaaccaatatttataaaccttgtttttaaccagggctgcgccctgtgcgcgtgaccgcgcacgccgaaggggggtgcccccccttctcgaaccctcccggcccgctaacgcgggcctcccatccccccaggggctgcgcccctcggccgcgaacggcctcaccccaaaaatggcagccaagctaggaaaagtcccatgtggatcactccgttgccccgtcgctcaccgtgttggggggaaggtgcacatggctcagttctcaatggaaattatctgcctaaccggctcagttctgcgtagaaaccaacatgcaagctccaccgggtgcaaagcggcagcggcggcaggatatattcaattgtaaatggcttcatgtccgggaaatctacatggatcagcaatgagtatgatggtcaatatggagaaaaagaaagagtaattaccaattttttttcaattcaaaaatgtagatgtccgcagcgttattataaaatgaaagtacattttgataaaacgacaaattacgatccgtcgtatttataggcgaaagcaataaacaaattattctaattcggaaatctttatttcgacgtgtctacattcacgtccaaatgggggcttagatgagaaacttcacgatcgatgcggccaccactcgagaagcttactagtcaacaattggccaatctttgttctaaattgctaataaacgaccatttccgtcaattctccttggttgcaacagtctacccgtcaaatgtttactaatttataagtgtgaagtttgaattatgaaagacgaaatcgtattaaaaattcacaagaataaacaactccatagattttcaaaaaaacagtcacgagaaaaaaaccacagtccgtttgtctgctcttctagtttttattatttttctattaatagttttttgttatttcgagaataaaatttgaacgatgtccgaaccacaaaagccgagccgataaatcctaagccgagcctaactttagccgtaaccatcagtcacggctcccgggctaattcatttgaaccgaatcataatcaacggtttagatcaaactcaaaacaatctaacggcaacatagacgcgtcggtgagctaaaaagagtgtgaaagccaggtcaccatagcattgtctctcccagattttttatttgggaaataatagaagaaatagaaaaaaataaaagagtgagaaaaatcgtagagctatatattcgcacatgtactcgtttcgctttccttagtgttagctgctgccgctgttgtttctcctccatttctctatctttctctctcgctgcttctcgaatcttctgtatcatcttcttcttcttcaaggtgagtctctagatccgttcgcttgattttgctgctcgttagtcgttattgttgattctctatgccgatttcgctagatctgtttagcatgcgttgtggttttatgagaaaatctttgttttgggggttgcttgttatgtgattcgatccgtgcttgttggatcgatctgagttaattcttaaggtttatgtgttagatctatggagtttgaggattcttctcgcttctgtcgatctctcgctgttatttttgtttttttcagtgaagtgaagttgtttagttcgaaatgacttcgtgtatgctcgattgatctggttttaatcttcgatctgttaggtgttgatgtttacaagtgaattctagtgttttctcgttgagatctgtgaagtttgaacctagttttctcaataatcaacatatgaagcgatgtttgagtttcaataaacgctgctaatcttcgaaactaagttgtgatctgattcgtgtttacttcatgagcttatccaattcatttcggtttcattttactttttttttagtgaaccatggcgcaagttagcagaatctgcaatggtgtgcagaacccatctcttatctccaatctctcgaaatccagtcaacgcaaatctcccttatcggtttctctgaagacgcagcagcatccacgagcttatccgatttcgtcgtcgtggggattgaagaagagtgggatgacgttaattggctctgagcttcgtcctcttaaggtcatgtcttctgtttccacggcgtgcatgcttcatggagcttcatctaggccagctactgccaggaagtctagcgggctcagtggcaccgtgcgcatccctggcgataaaagtatttcacacaggagcttcatgttcggaggacttgctagtggagagacgagaatcactggtttgcttgagggcgaagatgttatcaacaccggtaaggcgatgcaagcaatgggtgccagaatccgaaaagagggcgatacgtggatcatcgacggtgttggtaacggaggattgctcgctcccgaagcgccacttgactttgggaacgcagctacggggtgccgtcttactatgggactggtaggcgtgtatgactttgactctaccttcatcggtgacgcgagcctcactaagagaccaatgggacgagtgctgaatcccctgagggagatgggtgtccaggtgaaatctgaggatggtgatcgtcttccggttactctgcgaggccccaagacccccacgccaatcacgtacagggttccgatggcgtcagcacaggtcaagtcagcggtactcctggcgggcctcaacacacctggaatcacaaccgtgattgaacccatcatgactagagaccacacggagaagatgttgcagggtttcggcgctaatctaacggtcgaaaccgacgccgacggcgtgaggacaatccgcttggagggcagaggtaaactgactggccaagtcatcgatgtgcctggagatccctcgtccacagcgtttcccctcgtagctgcgttgctcgtccctggatctgatgtgacgatcctgaatgtcctcatgaatccaactagaaccggcctcatcctcacattgcaggagatgggtgctgacatcgaggttatcaatcctaggttggcaggtggagaggatgtggccgatctgcgcgtgcgttctagtacactcaaaggcgtgaccgtccctgaggatcgcgctccatccatgatcgacgagtaccccattctcgccgttgctgctgcgtttgccgagggcgcaactgtaatgaacggccttgaggagttgagggttaaggagagtgacaggctgtccgcggtggcgaatggcctgaagctaaacggcgtggactgcgacgaaggtgaaacgtcccttgtagtccgtggtcgcccagacgggaaggggttggggaatgcttcgggagctgctgtggcgacgcaccttgatcatagaatcgccatgtcatttctggtgatgggacttgtctccgagaatccggtgaccgttgacgatgctaccatgatcgccacctcctttcctgagttcatggacctcatggcaggcttgggggccaagatcgagctgtctgatactaaggccgcttgaattcccgatcgttcaaacatttggcaataaagtttcttaagattgaatcctgttgccggtcttgcgatgattatcatataatttctgttgaattacgttaagcatgtaataattaacatgtaatgcatgacgttatttatgagatgggtttttatgattagagtcccgcaattatacatttaatacgcgatagaaaacaaaatatagcgcgcaaactaggataaattatcgcgcgcggtgtcatctatgttactagatcggggatcccacgtgcggaccgcctgcaggccgcgttatcaagctaactgca

SEQ ID NO: 4818 - DNA, 8504 bp, artificial
  pMON99053
gtaccctcagcagtcgctgtgcgatcgccagcggtactcgctgaggtcgacgtagttagttaattcagctttcgttcgtatcatcggtttcgacaacgttcgtcaagttcaatgcatcagtttcattgcgcacacaccagaatcctactgagtttgagtattatggcattgggaaaactgtttttcttgtaccatttgttgtgcttgtaatttactgtgttttttattcggttttcgctatcgaactgtgaaatggaaatggatggagaagagttaatgaatgatatggtccttttgttcattctcaaattaatattatttgttttttctcttatttgttgtgtgttgaatttgaaattataagagatatgcaaacattttgttttgagtaaaaatgtgtcaaatcgtggcctctaatgaccgaagttaatatgaggagtaaaacacttgtagttgtaccattatgcttattcactaggcaacaaatatattttcagacctagaaaagctgcaaatgttactgaatacaagtatgtcctcttgtgttttagacatttatgaactttcctttatgtaattttccagaatccttgtcagattctaatcattgctttataattatagttatactcatggatttgtagttgagtatgaaaatattttttaatgcattttatgacttgccaattgattgacaacgcggccgccactcgagtggaagctagctttccgatcctacctgtcacttcatcaaaaggacagtagaaaaggaaggtggcacctacaaatgccatcattgcgataaaggaaaggctatcattcaagatgcctctgccgacagtggtcccaaagatggacccccacccacgaggagcatcgtggaaaaagaagacgttccaaccacgtcttcaaagcaagtggattgatgtgatacttccactgacgtaagggatgacgcacaatcccactatccttcgcaagacccttcctctatataaggaagttcatttcatttggagaggacacgctgaaatcaccagtctctctctacaagatcggggatctctagctagacgatcgtttcgcatgattgaacaagatggattgcacgcaggttctccggccgcttgggtggagaggctattcggctatgactgggcacaacagacaatcggctgctctgatgccgccgtgttccggctgtcagcgcaggggcgcccggttctttttgtcaagaccgacctgtccggtgccctgaatgaactgcaggacgaggcagcgcggctatcgtggctggccacgacgggcgttccttgcgcagctgtgctcgacgttgtcactgaagcgggaagggactggctgctattgggcgaagtgccggggcaggatctcctgtcatctcaccttgctcctgccgagaaagtatccatcatggctgatgcaatgcggcggctgcatacgcttgatccggctacctgcccattcgaccaccaagcgaaacatcgcatcgagcgagcacgtactcggatggaagccggtcttgtcgatcaggatgatctggacgaagagcatcaggggctcgcgccagccgaactgttcgccaggctcaaggcgcgcatgcccgacggcgaggatctcgtcgtgacccatggcgatgcctgcttgccgaatatcatggtggaaaatggccgcttttctggattcatcgactgtggccggctgggtgtggcggaccgctatcaggacatagcgttggctacccgtgatattgctgaagagcttggcggcgaatgggctgaccgcttcctcgtgctttacggtatcgccgctcccgattcgcagcgcatcgccttctatcgccttcttgacgagttcttctgagcgggactctggggttcgatccccaattcccgatcgttcaaacatttggcaataaagtttcttaagattgaatcctgttgccggtcttgcgatgattatcatataatttctgttgaattacgttaagcatgtaataattaacatgtaatgcatgacgttatttatgagatgggtttttatgattagagtcccgcaattatacatttaatacgcgatagaaaacaaaatatagcgcgcaaactaggataaattatcgcgcgcggtgtcatctatgttactagatcggggatcgggccactcgagtggtggccgcatcgatcgtgaagtttctcatctaagcccccatttggacgtgaatgtagacacgtcgaaataaagatttccgaattagaataatttgtttattgctttcgcctataaatacgacggatcgtaatttgtcgttttatcaaaatgtactttcattttataataacgctgcggacatctacatttttgaattgaaaaaaaattggtaattactctttctttttctccatattgaccatcatactcattgctgatccatgtagatttcccggacatgaagccatttacaattgaatatatcctgccgccgctgccgctttgcacccggtggagcttgcatgttggtttctacgcagaactgagccggttaggcagataatttccattgagaactgagccatgtgcaccttccccccaacacggtgagcgacggggcaacggagtgatccacatgggacttttcctagcttggctgccatttttggggtgaggccgttcgcggccgaggggcgcagcccctggggggatgggaggcccgcgttagcgggccgggagggttcgagaagggggggcaccccccttcggcgtgcgcggtcacgcgcacagggcgcagccctggttaaaaacaaggtttataaatattggtttaaaagcaggttaaaagacaggttagcggtggccgaaaaacgggcggaaacccttgcaaatgctggattttctgcctgtggacagcccctcaaatgtcaataggtgcgcccctcatctgtcagcactctgcccctcaagtgtcaaggatcgcgcccctcatctgtcagtagtcgcgcccctcaagtgtcaataccgcagggcacttatccccaggcttgtccacatcatctgtgggaaactcgcgtaaaatcaggcgttttcgccgatttgcgaggctggccagctccacgtcgccggccgaaatcgagcctgcccctcatctgtcaacgccgcgccgggtgagtcggcccctcaagtgtcaacgtccgcccctcatctgtcagtgagggccaagttttccgcgaggtatccacaacgccggcggccggccgcggtgtctcgcacacggcttcgacggcgtttctggcgcgtttgcagggccatagacggccgccagcccagcggcgagggcaaccagcccggtgagcgtcggaaagggtcgatcgaccgatgcccttgagagccttcaacccagtcagctccttccggtgggcgcggggcatgactatcgtcgccgcacttatgactgtcttctttatcatgcaactcgtaggacaggtgccggcagcgctctgggtcattttcggcgaggaccgctttcgctggagcgcgacgatgatcggcctgtcgcttgcggtattcggaatcttgcacgccctcgctcaagccttcgtcactggtcccgccaccaaacgtttcggcgagaagcaggccattatcgccggcatggcggccgacgcgctgggctacgtcttgctggcgttcgcgacgcgaggctggatggccttccccattatgattcttctcgcttccggcggcatcgggatgcccgcgttgcaggccatgctgtccaggcaggtagatgacgaccatcagggacagcttcaaggatcgctcgcggctcttaccagcctaacttcgatcattggaccgctgatcgtcacggcgatttatgccgcctcggcgagcacatggaacgggttggcatggattgtaggcgccgccctataccttgtctgcctccccgcgttgcgtcgcggtgcatggagccgggccacctcgacctgaatggaagccggcggcacctcgctaacggattcaccactccaagaattggagccaatcaattcttgcggagaactgtgaatgcgcaaaccaacccttggcagaacatatccatcgcgtccgccatctccagcagccgcacgcggcgcatctcgggcagcgttgggtcctggccacgggtgcgcatgatcgtgctcctgtcgttgaggacccggctaggctggcggggttgccttactggttagcagaatgaatcaccgatacgcgagcgaacgtgaagcgactgctgctgcaaaacgtctgcgacctgagcaacaacatgaatggtcttcggtttccgtgtttcgtaaagtctggaaacgcggaagtcagcgccctgcaccattatgttccggatctgcatcgcaggatgctgctggctaccctgtggaacacctacatctgtattaacgaagcgctggcattgaccctgagtgatttttctctggtcccgccgcatccataccgccagttgtttaccctcacaacgttccagtaaccgggcatgttcatcatcagtaacccgtatcgtgagcatcctctctcgtttcatcggtatcattacccccatgaacagaaatcccccttacacggaggcatcagtgaccaaacaggaaaaaaccgcccttaacatggcccgctttatcagaagccagacattaacgcttctggagaaactcaacgagctggacgcggatgaacaggcagacatctgtgaatcgcttcacgaccacgctgatgagctttaccgcagctgcctcgcgcgtttcggtgatgacggtgaaaacctctgacacatgcagctcccggagacggtcacagcttgtctgtaagcggatgccgggagcagacaagcccgtcagggcgcgtcagcgggtgttggcgggtgtcggggcgcagccatgacccagtcacgtagcgatagcggagtgtatactggcttaactatgcggcatcagagcagattgtactgagagtgcaccatatgcggtgtgaaataccgcacagatgcgtaaggagaaaataccgcatcaggcgctcttccgcttcctcgctcactgactcgctgcgctcggtcgttcggctgcggcgagcggtatcagctcactcaaaggcggtaatacggttatccacagaatcaggggataacgcaggaaagaacatgtgagcaaaaggccagcaaaaggccaggaaccgtaaaaaggccgcgttgctggcgtttttccataggctccgcccccctgacgagcatcacaaaaatcgacgctcaagtcagaggtggcgaaacccgacaggactataaagataccaggcgtttccccctggaagctccctcgtgcgctctcctgttccgaccctgccgcttaccggatacctgtccgcctttctcccttcgggaagcgtggcgctttctcatagctcacgctgtaggtatctcagttcggtgtaggtcgttcgctccaagctgggctgtgtgcacgaaccccccgttcagcccgaccgctgcgccttatccggtaactatcgtcttgagtccaacccggtaagacacgacttatcgccactggcagcagccactggtaacaggattagcagagcgaggtatgtaggcggtgctacagagttcttgaagtggtggcctaactacggctacactagaaggacagtatttggtatctgcgctctgctgaagccagttaccttcggaaaaagagttggtagctcttgatccggcaaacaaaccaccgctggtagcggtggtttttttgtttgcaagcagcagattacgcgcagaaaaaaaggatctcaagaagatcctttgatcttttctacggggtctgacgctcagtggaacgaaaactcacgttaagggattttggtcatgagattatcaaaaaggatcttcacctagatccttttaaattaaaaatgaagttttaaatcaatctaaagtatatatgagtaaacttggtctgacagttaccaatgcttaatcagtgaggcacctatctcagcgatctgtctatttcgttcatccatagttgcctgactccccgtcgtgtagataactacgatacgggagggcttaccatctggccccagtgctgcaatgataccgcgagacccacgctcaccggctccagatttatcagcaataaaccagccagccggaagggccgagcgcagaagtggtcctgcaactttatccgcctccatccagtctattaattgttgccgggaagctagagtaagtagttcgccagttaatagtttgcgcaacgttgttgccattgctgcaggtcgggagcacaggatgacgcctaacaattcattcaagccgacaccgcttcgcggcgcggcttaattcaggagttaaacatcatgagggaagcggtgatcgccgaagtatcgactcaactatcagaggtagttggcgtcatcgagcgccatctcgaaccgacgttgctggccgtacatttgtacggctccgcagtggatggcggcctgaagccacacagtgatattgatttgctggttacggtgaccgtaaggcttgatgaaacaacgcggcgagctttgatcaacgaccttttggaaacttcggcttcccctggagagagcgagattctccgcgctgtagaagtcaccattgttgtgcacgacgacatcattccgtggcgttatccagctaagcgcgaactgcaatttggagaatggcagcgcaatgacattcttgcaggtatcttcgagccagccacgatcgacattgatctggctatcttgctgacaaaagcaagagaacatagcgttgccttggtaggtccagcggcggaggaactctttgatccggttcctgaacaggatctatttgaggcgctaaatgaaaccttaacgctatggaactcgccgcccgactgggctggcgatgagcgaaatgtagtgcttacgttgtcccgcatttggtacagcgcagtaaccggcaaaatcgcgccgaaggatgtcgctgccgactgggcaatggagcgcctgccggcccagtatcagcccgtcatacttgaagctaggcaggcttatcttggacaagaagatcgcttggcctcgcgcgcagatcagttggaagaatttgttcactacgtgaaaggcgagatcaccaaggtagtcggcaaataatgtctaacaattcgttcaagccgacgccgcttcgcggcgcggcttaactcaagcgttagatgctgcaggcatcgtggtgtcacgctcgtcgtttggtatggcttcattcagctccggttcccaacgatcaaggcgagttacatgatcccccatgttgtgcaaaaaagcggttagctccttcggtcctccgatcgaggatttttcggcgctgcgctacgtccgcgaccgcgttgagggatcaagccacagcagcccactcgaccttctagccgacccagacgagccaagggatctttttggaatgctgctccgtcgtcaggctttccgacgtttgggtggttgaacagaagtcattatcgcacggaatgccaagcactcccgaggggaaccctgtggttggcatgcacatacaaatggacgaacggataaaccttttcacgcccttttaaatatccgattattctaataaacgctcttttctcttaggtttacccgccaatatatcctgtcaaacactgatagtttaaactgaaggcgggaaacgacaatctgatccccatcaagcttggccagcttctgcaggtccgattgagacttttcaacaaagggtaatatccggaaacctcctcggattccattgcccagctatctgtcactttattgtgaagatagtggaaaaggaaggtggctcctacaaatgccatcattgcgataaaggaaaggccatcgttgaagatgcctctgccgacagtggtcccaaagatggacccccacccacgaggagcatcgtggaaaaagaagacgttccaaccacgtcttcaaagcaagtggattgatgtgatggtccgattgagacttttcaacaaagggtaatatccggaaacctcctcggattccattgcccagctatctgtcactttattgtgaagatagtggaaaaggaaggtggctcctacaaatgccatcattgcgataaaggaaaggccatcgttgaagatgcctctgccgacagtggtcccaaagatggacccccacccacgaggagcatcgtggaaaaagaagacgttccaaccacgtcttcaaagcaagtggattgatgtgatatctccactgacgtaagggatgacgcacaatcccactatccttcgcaagacccttcctctatataaggaagttcatttcatttggagaggacacagaaaaatttgctacattgtttcacaaacttcaaatattattcatttatttgtcagctttcaaactctttgtttcttgtttgttgattagatctg

SEQ ID NO: 4819 - protein, 629 aa, artificial
  consensus
  misc_feature (1)..(201): Xaa can be any naturally occurring amino acid
  misc_feature (204)..(210): Xaa can be any naturally occurring amino acid
  misc_feature (212)..(213): Xaa can be any naturally occurring amino acid
  misc_feature (215)..(489): Xaa can be any naturally occurring amino acid
  misc_feature (492)..(494): Xaa can be any naturally occurring amino acid
  misc_feature (496)..(496): Xaa can be any naturally occurring amino acid
  misc_feature (498)..(498): Xaa can be any naturally occurring amino acid
  misc_feature (500)..(500): Xaa can be any naturally occurring amino acid
  misc_feature (502)..(505): Xaa can be any naturally occurring amino acid
  misc_feature (507)..(508): Xaa can be any naturally occurring amino acid
  misc_feature (510)..(512): Xaa can be any naturally occurring amino acid
  misc_feature (515)..(515): Xaa can be any naturally occurring amino acid
  misc_feature (517)..(629): Xaa can be any naturally occurring amino acid
XXXXXXXXXXXXXXXXXXXXXXXXXXXXXXXXXXXXXXXXXXXXXXXXXXXXXXXXXXXXXXXXXXXXXXXXXXXXXXXXXXXXXXXXXXXXXXXXXXXXXXXXXXXXXXXXXXXXXXXXXXXXXXXXXXXXXXXXXXXXXXXXXXXXXXXXXXXXXXXXXXXXXXXXXXXXXXXXXXXXXXXXXXXXXXXXXXXXXXXXXPFXXXXXXXFXXRXXXXXXXXXXXXXXXXXXXXXXXXXXXXXXXXXXXXXXXXXXXXXXXXXXXXXXXXXXXXXXXXXXXXXXXXXXXXXXXXXXXXXXXXXXXXXXXXXXXXXXXXXXXXXXXXXXXXXXXXXXXXXXXXXXXXXXXXXXXXXXXXXXXXXXXXXXXXXXXXXXXXXXXXXXXXXXXXXXXXXXXXXXXXXXXXXXXXXXXXXXXXXXXXXXXXXXXXXXXXXXXXXXXXXXXXXXXXXXXXXXXXXXXXXXXXXXXXXXXXXXXXXXXXXXXXXXXREXXXRXRXEXRXXXXRXXLXXXLLXKXXXXXXXXXXXXXXXXXXXXXXXXXXXXXXXXXXXXXXXXXXXXXXXXXXXXXXXXXXXXXXXXXXXXXXXXXXXXXXXXXXXXXXXXXXXXXXXXXXXXXXXXXXXXXXXXX

SEQ ID NO: 4820 - protein, 143 aa, artificial
  consensus
  misc_feature (1)..(65): Xaa can be any naturally occurring amino acid
  misc_feature (68)..(68): Xaa can be any naturally occurring amino acid
  misc_feature (74)..(76): Xaa can be any naturally occurring amino acid
  misc_feature (79)..(80): Xaa can be any naturally occurring amino acid
  misc_feature (83)..(83): Xaa can be any naturally occurring amino acid
  misc_feature (90)..(91): Xaa can be any naturally occurring amino acid
  misc_feature (104)..(104): Xaa can be any naturally occurring amino acid
  misc_feature (107)..(108): Xaa can be any naturally occurring amino acid
  misc_feature (111)..(112): Xaa can be any naturally occurring amino acid
  misc_feature (119)..(119): Xaa can be any naturally occurring amino acid
  misc_feature (128)..(128): Xaa can be any naturally occurring amino acid
  misc_feature (136)..(143): Xaa can be any naturally occurring amino acid
XXXXXXXXXXXXXXXXXXXXXXXXXXXXXXXXXXXXXXXXXXXXXXXXXXXXXXXXXXXXXXXXXPKXRAETWXXXETXXLIXLRREMDXXFNTSKSNKHLWEXISXXMRXXGFDRSPXMCTDKWRNXLKEFKKAXXXXXXXX

SEQ ID NO: 4821 - protein, 587 aa, artificial
  consensus
  misc_feature (1)..(89): Xaa can be any naturally occurring amino acid
  misc_feature (91)..(132): Xaa can be any naturally occurring amino acid
  misc_feature (134)..(134): Xaa can be any naturally occurring amino acid
  misc_feature (141)..(141): Xaa can be any naturally occurring amino acid
  misc_feature (148)..(149): Xaa can be any naturally occurring amino acid
  misc_feature (151)..(153): Xaa can be any naturally occurring amino acid
  misc_feature (156)..(196): Xaa can be any naturally occurring amino acid
  misc_feature (206)..(206): Xaa can be any naturally occurring amino acid
  misc_feature (209)..(211): Xaa can be any naturally occurring amino acid
  misc_feature (214)..(214): Xaa can be any naturally occurring amino acid
  misc_feature (235)..(235): Xaa can be any naturally occurring amino acid
  misc_feature (237)..(237): Xaa can be any naturally occurring amino acid
  misc_feature (240)..(240): Xaa can be any naturally occurring amino acid
  misc_feature (242)..(243): Xaa can be any naturally occurring amino acid
  misc_feature (245)..(245): Xaa can be any naturally occurring amino acid
  misc_feature (250)..(251): Xaa can be any naturally occurring amino acid
  misc_feature (254)..(256): Xaa can be any naturally occurring amino acid
  misc_feature (258)..(261): Xaa can be any naturally occurring amino acid
  misc_feature (263)..(263): Xaa can be any naturally occurring amino acid
  misc_feature (265)..(265): Xaa can be any naturally occurring amino acid
  misc_feature (267)..(268): Xaa can be any naturally occurring amino acid
  misc_feature (272)..(272): Xaa can be any naturally occurring amino acid
  misc_feature (288)..(463): Xaa can be any naturally occurring amino acid
  misc_feature (465)..(472): Xaa can be any naturally occurring amino acid
  misc_feature (474)..(481): Xaa can be any naturally occurring amino acid
  misc_feature (484)..(488): Xaa can be any naturally occurring amino acid
  misc_feature (490)..(495): Xaa can be any naturally occurring amino acid
  misc_feature (497)..(497): Xaa can be any naturally occurring amino acid
  misc_feature (500)..(500): Xaa can be any naturally occurring amino acid
  misc_feature (503)..(503): Xaa can be any naturally occurring amino acid
  misc_feature (505)..(508): Xaa can be any naturally occurring amino acid
  misc_feature (512)..(512): Xaa can be any naturally occurring amino acid
  misc_feature (515)..(519): Xaa can be any naturally occurring amino acid
  misc_feature (521)..(521): Xaa can be any naturally occurring amino acid
  misc_feature (523)..(523): Xaa can be any naturally occurring amino acid
  misc_feature (525)..(525): Xaa can be any naturally occurring amino acid
  misc_feature (527)..(530): Xaa can be any naturally occurring amino acid
  misc_feature (533)..(533): Xaa can be any naturally occurring amino acid
  misc_feature (535)..(536): Xaa can be any naturally occurring amino acid
  misc_feature (538)..(542): Xaa can be any naturally occurring amino acid
  misc_feature (544)..(587): Xaa can be any naturally occurring amino acid
XXXXXXXXXXXXXXXXXXXXXXXXXXXXXXXXXXXXXXXXXXXXXXXXXXXXXXXXXXXXXXXXXXXXXXXXXXXXXXXXXXXXXXXXXSXXXXXXXXXXXXXXXXXXXXXXXXXXXXXXXXXXXXXXXXXXWXRMKWTDXMVRLLIXXVXXXGDXXXXXXXXXXXXXXXXXXXXXXXXXXXXXXXXXXXXXXXXXKKGKWKSVSXAMXXXGFXVSPQQCEDKFNDLNKRYKRVXDXLGXGXXCXVVENXXLLXXXDXXXXKXKXEXXKLLXSKHLFFREMCAYHNSXXXXXXXXXXXXXXXXXXXXXXXXXXXXXXXXXXXXXXXXXXXXXXXXXXXXXXXXXXXXXXXXXXXXXXXXXXXXXXXXXXXXXXXXXXXXXXXXXXXXXXXXXXXXXXXXXXXXXXXXXXXXXXXXXXXXXXXXXXXXXXXXXXXXXXXXXXXXXXXXXXXXXXXXXXXXXXXXGXXXXXXXXWXXXXXXXXEEXXXXXEXXXXXXEXQRXKWXRXXXXKERXMEXXXXXLXNXRXRXXXXRMXLXXRXXXXXLXXXXXXXXXXXXXXXXXXXXXXXXXXXXXXXXXXXXXXXXXXXX

SEQ ID NO: 4822 - protein, 251 aa, artificial
  consensus
  misc_feature (1)..(40): Xaa can be any naturally occurring amino acid
  misc_feature (42)..(46): Xaa can be any naturally occurring amino acid
  misc_feature (48)..(60): Xaa can be any naturally occurring amino acid
  misc_feature (62)..(64): Xaa can be any naturally occurring amino acid
  misc_feature (66)..(73): Xaa can be any naturally occurring amino acid
  misc_feature (75)..(97): Xaa can be any naturally occurring amino acid
  misc_feature (99)..(99): Xaa can be any naturally occurring amino acid
  misc_feature (102)..(104): Xaa can be any naturally occurring amino acid
  misc_feature (107)..(107): Xaa can be any naturally occurring amino acid
  misc_feature (110)..(110): Xaa can be any naturally occurring amino acid
  misc_feature (113)..(114): Xaa can be any naturally occurring amino acid
  misc_feature (116)..(117): Xaa can be any naturally occurring amino acid
  misc_feature (120)..(127): Xaa can be any naturally occurring amino acid
  misc_feature (129)..(136): Xaa can be any naturally occurring amino acid
  misc_feature (139)..(146): Xaa can be any naturally occurring amino acid
  misc_feature (148)..(152): Xaa can be any naturally occurring amino acid
  misc_feature (154)..(155): Xaa can be any naturally occurring amino acid
  misc_feature (157)..(157): Xaa can be any naturally occurring amino acid
  misc_feature (159)..(251): Xaa can be any naturally occurring amino acid
XXXXXXXXXXXXXXXXXXXXXXXXXXXXXXXXXXXXXXXXGXXXXXRXXXXXXXXXXXXXKXXXRXXXXXXXXDXXXXXXXXXXXXXXXXXXXXXXXPXDEXXXPGXGQXYCXXCXXYFXXXXXXXXHXXXXXXXXKRXXXXXXXXPXXXXXAXXAXGXXXXXXXXXXXXXXXXXXXXXXXXXXXXXXXXXXXXXXXXXXXXXXXXXXXXXXXXXXXXXXXXXXXXXXXXXXXXXXXXXXXXXXXXXXXXX

SEQ ID NO: 4823 - protein, 597 aa, artificial
  consensus
  misc_feature (1)..(96): Xaa can be any naturally occurring amino acid
  misc_feature (100)..(102): Xaa can be any naturally occurring amino acid
  misc_feature (105)..(111): Xaa can be any naturally occurring amino acid
  misc_feature (113)..(113): Xaa can be any naturally occurring amino acid
  misc_feature (115)..(129): Xaa can be any naturally occurring amino acid
  misc_feature (131)..(131): Xaa can be any naturally occurring amino acid
  misc_feature (135)..(143): Xaa can be any naturally occurring amino acid
  misc_feature (145)..(146): Xaa can be any naturally occurring amino acid
  misc_feature (148)..(150): Xaa can be any naturally occurring amino acid
  misc_feature (154)..(154): Xaa can be any naturally occurring amino acid
  misc_feature (161)..(161): Xaa can be any naturally occurring amino acid
  misc_feature (163)..(189): Xaa can be any naturally occurring amino acid
  misc_feature (191)..(191): Xaa can be any naturally occurring amino acid
  misc_feature (194)..(201): Xaa can be any naturally occurring amino acid
  misc_feature (203)..(203): Xaa can be any naturally occurring amino acid
  misc_feature (206)..(207): Xaa can be any naturally occurring amino acid
  misc_feature (209)..(212): Xaa can be any naturally occurring amino acid
  misc_feature (214)..(215): Xaa can be any naturally occurring amino acid
  misc_feature (217)..(295): Xaa can be any naturally occurring amino acid
  misc_feature (297)..(320): Xaa can be any naturally occurring amino acid
  misc_feature (322)..(331): Xaa can be any naturally occurring amino acid
  misc_feature (333)..(336): Xaa can be any naturally occurring amino acid
  misc_feature (338)..(341): Xaa can be any naturally occurring amino acid
  misc_feature (344)..(362): Xaa can be any naturally occurring amino acid
  misc_feature (365)..(389): Xaa can be any naturally occurring amino acid
  misc_feature (391)..(393): Xaa can be any naturally occurring amino acid
  misc_feature (395)..(466): Xaa can be any naturally occurring amino acid
  misc_feature (468)..(468): Xaa can be any naturally occurring amino acid
  misc_feature (470)..(480): Xaa can be any naturally occurring amino acid
  misc_feature (482)..(597): Xaa can be any naturally occurring amino acid
XXXXXXXXXXXXXXXXXXXXXXXXXXXXXXXXXXXXXXXXXXXXXXXXXXXXXXXXXXXXXXXXXXXXXXXXXXXXXXXXXXXXXXXXXXXXXXXXPQWXXXETXXXXXXXRXEXXXXXXXXXXXXXXXKXLWEXXXXXXXXXGXXRXXXQCKXKWKNLVXRXXXXXXXXXXXXXXXXXXXXXXXXXXXGXETXXXXXXXXQXPFXXEXXXXFXXRXXXXXXXXXXXXXXXXXXXXXXXXXXXXXXXXXXXXXXXXXXXXXXXXXXXXXXXXXXXXXXXXXXXXXXXXXXXXXXXKXXXXXXXXXXXXXXXXXXXXXXXXFXXXXXXXXXXWXXXXEXXXXERXXXXXXXXXXXXXXXXXXXWRXXXXXXXXXXXXXXXXXXXXXXXXXLXXXRXXXXXXXXXXXXXXXXXXXXXXXXXXXXXXXXXXXXXXXXXXXXXXXXXXXXXXXXXXXXXXXXXXXXXXXXEXRXXXXXXXXXXXLXXXXXXXXXXXXXXXXXXXXXXXXXXXXXXXXXXXXXXXXXXXXXXXXXXXXXXXXXXXXXXXXXXXXXXXXXXXXXXXXXXXXXXXXXXXXXXXXXXXXXXXXXXXXXXXXXXXX

SEQ ID NO: 4824 - protein, 229 aa, artificial
  consensus
  misc_feature (1)..(10): Xaa can be any naturally occurring amino acid
  misc_feature (13)..(13): Xaa can be any naturally occurring amino acid
  misc_feature (15)..(17): Xaa can be any naturally occurring amino acid
  misc_feature (23)..(23): Xaa can be any naturally occurring amino acid
  misc_feature (25)..(25): Xaa can be any naturally occurring amino acid
  misc_feature (30)..(33): Xaa can be any naturally occurring amino acid
  misc_feature (35)..(35): Xaa can be any naturally occurring amino acid
  misc_feature (37)..(37): Xaa can be any naturally occurring amino acid
  misc_feature (39)..(39): Xaa can be any naturally occurring amino acid
  misc_feature (41)..(43): Xaa can be any naturally occurring amino acid
  misc_feature (49)..(49): Xaa can be any naturally occurring amino acid
  misc_feature (52)..(53): Xaa can be any naturally occurring amino acid
  misc_feature (55)..(56): Xaa can be any naturally occurring amino acid
  misc_feature (59)..(72): Xaa can be any naturally occurring amino acid
  misc_feature (75)..(75): Xaa can be any naturally occurring amino acid
  misc_feature (81)..(83): Xaa can be any naturally occurring amino acid
  misc_feature (87)..(87): Xaa can be any naturally occurring amino acid
  misc_feature (92)..(93): Xaa can be any naturally occurring amino acid
  misc_feature (95)..(96): Xaa can be any naturally occurring amino acid
  misc_feature (99)..(161): Xaa can be any naturally occurring amino acid
  misc_feature (163)..(163): Xaa can be any naturally occurring amino acid
  misc_feature (165)..(167): Xaa can be any naturally occurring amino acid
  misc_feature (169)..(171): Xaa can be any naturally occurring amino acid
  misc_feature (173)..(174): Xaa can be any naturally occurring amino acid
  misc_feature (176)..(176): Xaa can be any naturally occurring amino acid
  misc_feature (179)..(179): Xaa can be any naturally occurring amino acid
  misc_feature (185)..(188): Xaa can be any naturally occurring amino acid
  misc_feature (191)..(193): Xaa can be any naturally occurring amino acid
  misc_feature (195)..(197): Xaa can be any naturally occurring amino acid
  misc_feature (199)..(200): Xaa can be any naturally occurring amino acid
  misc_feature (203)..(204): Xaa can be any naturally occurring amino acid
  misc_feature (206)..(229): Xaa can be any naturally occurring amino acid
XXXXXXXXXXMEXQXXXKRKRVXSXEPNKXXXXAXFXRXYXXXLVPALXKIXXNXXSSXXXXXXXXXXXXXXVKXEVDMAXXXSAQXFAWSXXLXXKLXXXXXXXXXXXXXXXXXXXXXXXXXXXXXXXXXXXXXXXXXXXXXXXXXXXXXXXXXXXXXXXGXEXXXIXXXLXXLXKLXPGGEEXXXXEEXXXEXXXYXXCLXXQXXXXXXXXXXXXXXXXXXXXXXXX

SEQ ID NO: 4825 - protein, 487 aa, artificial
  consensus
  misc_feature (1)..(11): Xaa can be any naturally occurring amino acid
  misc_feature (13)..(21): Xaa can be any naturally occurring amino acid
  misc_feature (25)..(25): Xaa can be any naturally occurring amino acid
  misc_feature (27)..(32): Xaa can be any naturally occurring amino acid
  misc_feature (35)..(36): Xaa can be any naturally occurring amino acid
  misc_feature (38)..(40): Xaa can be any naturally occurring amino acid
  misc_feature (42)..(54): Xaa can be any naturally occurring amino acid
  misc_feature (57)..(58): Xaa can be any naturally occurring amino acid
  misc_feature (60)..(62): Xaa can be any naturally occurring amino acid
  misc_feature (64)..(65): Xaa can be any naturally occurring amino acid
  misc_feature (68)..(69): Xaa can be any naturally occurring amino acid
  misc_feature (71)..(72): Xaa can be any naturally occurring amino acid
  misc_feature (75)..(76): Xaa can be any naturally occurring amino acid
  misc_feature (78)..(79): Xaa can be any naturally occurring amino acid
  misc_feature (81)..(82): Xaa can be any naturally occurring amino acid
  misc_feature (84)..(84): Xaa can be any naturally occurring amino acid
  misc_feature (86)..(86): Xaa can be any naturally occurring amino acid
  misc_feature (89)..(89): Xaa can be any naturally occurring amino acid
  misc_feature (97)..(98): Xaa can be any naturally occurring amino acid
  misc_feature (100)..(100): Xaa can be any naturally occurring amino acid
  misc_feature (111)..(111): Xaa can be any naturally occurring amino acid
  misc_feature (113)..(114): Xaa can be any naturally occurring amino acid
  misc_feature (122)..(122): Xaa can be any naturally occurring amino acid
  misc_feature (124)..(127): Xaa can be any naturally occurring amino acid
  misc_feature (129)..(129): Xaa can be any naturally occurring amino acid
  misc_feature (131)..(143): Xaa can be any naturally occurring amino acid
  misc_feature (145)..(149): Xaa can be any naturally occurring amino acid
  misc_feature (151)..(158): Xaa can be any naturally occurring amino acid
  misc_feature (161)..(162): Xaa can be any naturally occurring amino acid
  misc_feature (164)..(164): Xaa can be any naturally occurring amino acid
  misc_feature (168)..(168): Xaa can be any naturally occurring amino acid
  misc_feature (170)..(170): Xaa can be any naturally occurring amino acid
  misc_feature (173)..(173): Xaa can be any naturally occurring amino acid
  misc_feature (177)..(177): Xaa can be any naturally occurring amino acid
  misc_feature (180)..(185): Xaa can be any naturally occurring amino acid
  misc_feature (187)..(187): Xaa can be any naturally occurring amino acid
  misc_feature (189)..(189): Xaa can be any naturally occurring amino acid
  misc_feature (192)..(196): Xaa can be any naturally occurring amino acid
  misc_feature (199)..(200): Xaa can be any naturally occurring amino acid
  misc_feature (203)..(218): Xaa can be any naturally occurring amino acid
  misc_feature (221)..(222): Xaa can be any naturally occurring amino acid
  misc_feature (224)..(235): Xaa can be any naturally occurring amino acid
  misc_feature (237)..(239): Xaa can be any naturally occurring amino acid
  misc_feature (241)..(243): Xaa can be any naturally occurring amino acid
  misc_feature (245)..(246): Xaa can be any naturally occurring amino acid
  misc_feature (248)..(250): Xaa can be any naturally occurring amino acid
  misc_feature (252)..(252): Xaa can be any naturally occurring amino acid
  misc_feature (256)..(256): Xaa can be any naturally occurring amino acid
  misc_feature (259)..(260): Xaa can be any naturally occurring amino acid
  misc_feature (263)..(264): Xaa can be any naturally occurring amino acid
  misc_feature (266)..(270): Xaa can be any naturally occurring amino acid
  misc_feature (272)..(272): Xaa can be any naturally occurring amino acid
  misc_feature (274)..(274): Xaa can be any naturally occurring amino acid
  misc_feature (276)..(276): Xaa can be any naturally occurring amino acid
  misc_feature (282)..(283): Xaa can be any naturally occurring amino acid
  misc_feature (285)..(288): Xaa can be any naturally occurring amino acid
  misc_feature (291)..(291): Xaa can be any naturally occurring amino acid
  misc_feature (293)..(294): Xaa can be any naturally occurring amino acid
  misc_feature (296)..(487): Xaa can be any naturally occurring amino acid
XXXXXXXXXXXEXXXXXXXXXWMSXQXXXXXXLKXXLXXXRXXXXXXXXXXXXXKLXXLXXXIXXDFXXYXXKRXXLXXRXXSXYXAPXWNSPLENXXLXWMGGCRPSSFXRXXYALCGSQXEXXXXQXLXXXXXXXXXXXXXDXXXXXGXXXXXXXXGGXXSXSDLXAXQLXKINXLHXXXXXXEXKXTKXXXXXQEXXADXXXXXXXXXXXXXXXXIAXXAXXXXXXXXXXXXVXXXLXXXEXXMXXXLXEADXLRXXTLXXIXXXXXPXQXAXFLLAGXXLXXXXHEXGXXRXXXXXXXXXXXXXXXXXXXXXXXXXXXXXXXXXXXXXXXXXXXXXXXXXXXXXXXXXXXXXXXXXXXXXXXXXXXXXXXXXXXXXXXXXXXXXXXXXXXXXXXXXXXXXXXXXXXXXXXXXXXXXXXXXXXXXXXXXXXXXXXXXXXXXXXXXXXXXXXXXXXXXXXXXXXXXXXXXXXXXXXXXXXXXXXX
